(19) United States
(12) Patent Application Publication
(10) Pub. No.: US 2005/0059018 A1
(43) Pub. Date: Mar. 17, 2005

(54) Virulence-associated nucleic acids and proteins and uses thereof

(76) Inventors: Laurence Rahme, Brookline, MA (US); Jianxin He, Malden, MA (US); Regina Baldini, Sao Paulo (BR); Jens Solsbacher, Liederbach (DE); Peter Wagner, Idstein (DE)

Correspondence Address: CLARK & ELBING LLP, 101 FEDERAL STREET, BOSTON, MA, 02110, US

(21) Appl. No.: 10/660,811

(22) Filed: Sep. 12, 2003

Related U.S. Application Data
(60) Provisional application No. 60/410,376, filed on Sep. 12, 2002.
(60) Provisional application No. 60/410,817, filed on Sep. 13, 2002.

(51) Int. Cl. C12Q 1/68; C07H 21/04; C07K 14/785

(52) U.S. Cl. 435/6; 435/69.1; 435/320.1; 435/325; 530/350; 536/23.5

(57) ABSTRACT

The present invention features methods and compositions relating to bacterial virulence polypeptides and nucleic acid sequences (e.g., DNA) encoding such polypeptides. Based on the present invention, a pathogenic infection may be treated, prevented, or reduced by administering to an infected mammal or plant a therapeutically effective amount of a composition that inhibits the expression or activity of a polypeptide encoded by the virulence factors. Also disclosed are methods for producing such polypeptides by recombinant techniques as well as methods for utilizing such polypeptides to screen for antibacterial or bacteriostatic compounds.

### CROSS-REFERENCE TO RELATED APPLICATIONS

[0001] This application claims the benefit of U.S. Provisional Application Nos. 60/410,376 (filed Sep. 12, 2002) and 60/410,817 (filed Sep. 13, 2002), each of which is hereby incorporated by reference.

### BACKGROUND OF THE INVENTION

[0002] In general, the present invention relates to nucleic acid molecules, genes, and polypeptides that are related to microbial pathogenicity.

[0003] Pathogens employ a number of genetic strategies to cause infection and, occasionally, disease in their hosts. The expression of microbial pathogenicity is dependent upon complex genetic regulatory circuits. Knowledge of the themes in microbial pathogenicity is necessary for understanding pathogen virulence mechanisms and for the development of new “anti-virulence” or “anti-pathogenic” agents, which are needed to combat infection and disease.

[0004] The mechanism of pathogenesis and the host defense is a field of intense investigation. Antibiotics have been an effective tool to treat unwanted bacterial infections. However, due to the increasing incidence of resistance to current antibiotics, new antibiotics are needed. Antibiotics that target non-essential genes are desirable because there is limited, if any, selection pressure on these genes since they are not required for the survival of the bacteria. Thus, bacteria are less likely to develop resistance to antibiotics that target these genes.

[0005] In one particular example, the opportunistic human pathogen, Pseudomonas aeruginosa, is a ubiquitous gram-negative bacterium isolated from soil, water, and plants (Palleroni, J. N. In: Bergey's Manual of Systematic Bacteriology, ed., J. G. Holt, Williams & Wilkins, Baltimore, Md., pp. 141-172, 1984). A variety of P. aeruginosa virulence factors have been described and the majority of these, such as exotoxin A, elastase, and phospholipase C, were first detected biochemically on the basis of their cytotoxic activity (Fink, R. B., Pseudomonas aeruginosa the Opportunist: Pathogenesis and Disease, Boca Raton, CRC Press Inc., 1993). Subsequently, genes corresponding to these factors or genes that regulate the expression of these factors were identified. In general, most pathogenicity-related genes in mammalian bacterial pathogens were first detected using a bio-assay. In contrast to mammalian pathogens, simple systematic genetic strategies have been routinely employed to identify pathogenicity-related genes in plant pathogens. Following random transposon-mediated mutagenesis, thousands of mutant clones of the phytopathogen are inoculated separately into individual plants to determine if they contain a mutation that affects the pathogenic interaction with the host (Boucher et al., J. Bacteriol (1987) 168:5626-5623; Comai and Kosuge, J. Bacteriol. (1982) 149:40-46; Lindgren et al., J. Bacteriol. (1986) 168:512-522; Rahme et al., J. Bacteriol. (1991) 173:575-586; Willis et al., Mol. Plant-Microbe Interact. (1990) 3:149-156). Comparable experiments using whole-animal mammalian pathogenicity models are not feasible because of the vast numbers of animals that must be subjected to pathogenic attack.

[0006] Improved methods are needed for treating, stabilizing, or preventing pathogenic infections such as bacterial and fungal infections. In particular, improved methods are needed to treat infections by opportunistic pathogens such as Pseudomonas.

### SUMMARY OF THE INVENTION

[0007] In general, this invention relates to the identification and characterization of novel virulence factors. These virulence factors can be used in a variety of applications such as (i) the generation of antibodies for diagnostic and therapeutic applications, (ii) the generation of pharmaceutical compositions, (iii) the production of diagnostic compositions for detecting pathogenic infections, (iv) the identification of compounds useful for the treatment, stabilization, or prevention of pathogenic infections in mammals (e.g. humans), (v) the treatment or prevention of pathogenic infections, (vi) the diagnosis of pathogenic infections, (vii) the identification of additional virulence factors, (viii) the identification of novel mammalian nucleic acids (e.g., human lung genes), and (ix) plant disease control.

[0008] Here, we have identified and characterized a number of nucleic acid molecules and polypeptides that are involved in conferring pathogenicity and virulence to a pathogen. Our discovery therefore provides a basis for drug-screening assays aimed at evaluating and identifying “anti-virulence” agents that are capable of blocking pathogenicity and virulence of a pathogen (e.g., by selectively switching pathogen gene expression on or off) or that inactivate or inhibit the activity of a polypeptide involved in the pathogenicity of a microbe. In turn, drugs that target these molecules are useful as anti-virulence agents.

[0009] In the first aspect, the invention features an isolated nucleic acid molecule encoding a pathogenic virulence factor protein having an amino acid sequence substantially identical (e.g., at least 25%, 50%, 80%, 90%, 95%, 99%, or even 100% identical) to any one of the amino acid sequences of any one of the ORFs described herein (for example, any one of SEQ ID NOs: 127-229 and SEQ ID NOs: 278-280). Optionally, the protein encoded by the nucleic acid binds a human protein such as a lung protein or has an Arg-Gly-Asp motif. The invention also features a nucleic acid molecule having a sequence substantially identical to any one of the polynucleotide sequence of SEQ ID NOs: 1-108, SEQ ID NOs: 119-120, and SEQ ID NOs: 281-282. Accordingly, this sequence is at least 25%, 30%, 40%, 50%, 60%, 65%, 70%, 80%, 90%, 95%, 99%, or even 100% identical to the nucleotide sequence of any of the ORFs of the invention or the complement thereof. Optionally, the nucleic acid hybridizes at high stringency to a region of any one of the polynucleotide sequences of SEQ ID NOs: 1-108, SEQ ID NOs: 119-120, and SEQ ID NOs: 281-282 or the complement thereof. For example, the nucleic acid may have a sequence complimentary to at least 50% of at least 60 nucleotides of any one of the polynucleotide sequences of the invention. Optionally, the nucleic acid of the invention contains at least 100 contiguous nucleotides (or 200, 300, 400, 500, 600, 700, 800, 900 or more contiguous nucleotides) of any one of the polynucleotide sequences of SEQ ID NOs: 1-108, SEQ ID NOs: 119-120, and SEQ ID NOs: 281-282. Preferably, the isolated nucleic acid molecule includes any of the above-described sequences or a fragment thereof and is derived from a pathogen (e.g., from a bacterial pathogen such as Pseudomonas aeruginosa, e.g., PA14).

[0010] The invention further provides an isolated nucleic acid substantially identical (e.g., at least 25%, 50%, 80%, 90%, 95%, 99%, or even 100% identical) to the nucleotide sequence of SEQ ID NOs: 109-118. Alternatively, the nucleic acid may encode a protein having an amino acid sequence at least 25% identical to any one of the amino acid sequences of SEQ ID NOs: 269-277. According to this invention, the protein encoded by this nucleic acid is expressed in the lungs of a mammal where it binds the polypeptide (SEQ ID NO: 278 or SEQ ID NO: 280) encoded by the ORF7 nucleic acid (SEQ ID NO: 119 or SEQ ID NO: 281).

[0011] The invention further features a probe, which hybridizes under hybridizing conditions to any of the nucleic acid molecules of the invention. Such a probe may be any fragment of SEQ ID NO: 1 or 2. The probe of the invention may also include at least one modified linkage (e.g., a phosphorothioate, a methylphosphonate, a phosphotriester, a phosphorodithioate, or a phosphoselenate linkage), modified nucleobase (e.g., a 5-methyl cytosine), and/or a modified sugar moiety (e.g., a 2′-O-methoxyethyl group or a 2′-O-methyl group). In one embodiment, the probe is a chimeric polynucleotide (e.g., an oligonucleotide that includes DNA residues linked together by phosphorothioate or phosphodiester linkages, flanked on each side by at least one, two, three, or four 2′-O-methyl RNA residue linked together by a phosphorothioate linkage). Thus, a probe according to this invention includes natural and non-natural oligonucleotides, both modified and unmodified, as well as oligonucleotide mimetics such as Protein Nucleic Acids, locked nucleic acids, and arabinonucleic acids. Numerous nucleobases and linkage groups may be employed in the nucleobase oligomers of the invention.

[0012] In addition, the invention includes a vector and a cell, each of which includes at least one of the isolated nucleic acid molecules of the invention. The invention further provides a method of producing a recombinant polypeptide by providing a cell transformed with a nucleic acid molecule of the invention, which is positioned for expression in the cell, culturing the transformed cell under conditions for expressing the nucleic acid molecule, and isolating a recombinant polypeptide. The invention also features recombinant polypeptides produced by the expression of an isolated nucleic acid molecule of the invention and substantially pure antibodies that specifically recognize and bind such recombinant polypeptides.

[0013] In another aspect, the invention features a substantially pure polypeptide having an amino acid sequence that is substantially identical to any one of the amino acid sequences of SEQ ID NOs: 127-229 and SEQ ID NOs: 278-280. Thus, the protein may have an amino acid sequence which is at least 25%, 30%, 40%, 50%, 60%, 65%, 70%, 80%, 90%, 95%, 99%, or even 100% identical to the sequence of any of the polypeptides of the invention. Desirably, the substantially pure polypeptide includes any of the above-described sequences or a fragment thereof and is derived from a pathogen (e.g., from a bacterial pathogen such as Pseudomonas aeruginosa, e.g., PA14). Preferably, the protein is a pathogenic virulence factor. The protein may bind a human protein such as a lung protein and optionally, the protein has an Arg-Gly-Asp motif. The protein may further be immunogenic. Desirably, the protein contains at least 100 contiguous amino acids of any of the amino acid sequences of the invention.

[0014] The present invention further features a fusion protein containing the protein of the invention and a protein of interest. Also featured is a purified antibody that specifically binds the protein of the invention.

[0015] The invention also features a substantially pure protein having an amino acid sequence at least 25% identical to any one of the amino acid sequences of SEQ ID NOs: 269-277, such that the protein binds the polypeptide (SEQ ID NO: 278 or SEQ ID NO: 280) encoded by the ORF7 nucleic acid (SEQ ID NO: 119 or SEQ ID NO: 281); although binding may occur anywhere in the mammal (e.g., any organ in the mammal), optionally, such binding occurs in the lungs.

[0016] In a related aspect, the invention features a pharmaceutical composition containing a pharmaceutically acceptable carrier in addition to a nucleic acid, a protein, a probe, or an antibody of the invention in an amount sufficient to treat, stabilize, or prevent a pathogenic infection in a mammal. For example, the pathogen may be Pseudomonas aeruginosa.

[0017] In yet another related aspect, the invention features a diagnostic composition for the detection of pathogenic bacteria (e.g., Pseudomonas aeruginosa) that contains a nucleic acid or an antibody of the invention.

[0018] In another aspect, the invention features a method for identifying a compound that decreases the expression of a virulence factor. This method involves the steps of: (a) contacting a pathogenic cell that expresses a virulence factor gene (including any one of the nucleic acid molecules of the invention) with a candidate compound; and (b) measuring the expression of this nucleic acid, such that a decrease in the expression of the virulence factor following contact with the candidate compound identifies the compound as having the ability to decrease the expression of a pathogenic virulence factor. In preferred embodiments, the pathogenic cell (e.g., Pseudomonas aeruginosa) infects a mammal (e.g., a human) or a plant.

[0019] In yet another related aspect, the invention features a method for identifying a compound which is capable of decreasing the expression of a pathogenic virulence factor (e.g., at the transcriptional or post-transcriptional levels), involving (a) providing a pathogenic cell expressing any one of the isolated nucleic acid molecules of the invention; and (b) contacting the pathogenic cell with a candidate compound, such that a decrease in the expression of the nucleic acid molecule following contact with the candidate compound identifies the compound as having the ability to decrease the expression of a pathogenic virulence factor. In preferred embodiments, the pathogenic cell (e.g., Pseudomonas aeruginosa) infects a mammal (e.g., a human) or a plant.

[0020] In yet another related aspect, the invention features a method for identifying a compound which binds a virulence factor involving (a) contacting a candidate compound with a substantially pure polypeptide including any one of the amino acid sequences of the invention under conditions that allow binding; and (b) detecting binding of the candidate compound to the polypeptide.

[0021] In yet another related aspect, the invention features a method for identifying a compound which binds a virulence factor, involving (a) contacting a candidate compound with a first protein which is a substantially pure polypeptide (including any one of the amino acid sequences of the invention) and a second protein capable of binding the polypeptide of the invention under conditions that allow binding; and (b) measuring the binding of the first protein to the second protein, such that a decrease in binding effected by the candidate compound indicates that this compound binds to the first protein or the protein of the invention. Desirably, the candidate compound inhibits virulence of a pathogen. The second protein may be an antibody or antibody fragment. Optionally, the second protein may be a human lung protein. The candidate compound may be a mammalian or plant protein. If desired, the protein of the invention or the candidate compound may be immobilized on a support or may have a detectable group. Alternatively, the candidate compound may be expressed on the surface of a phage or maybe expressed using RNA display. According to this invention, contacting of the candidate compounds with the two proteins may occur in a cell-free system or in a cell and binding of the candidate compound to the first protein may be detected using a yeast two-hybrid system.

[0022] In addition, the invention features a method of treating a pathogenic infection in a mammal involving (a) identifying a mammal having a pathogenic infection; and (b) administering to the mammal a therapeutically effective amount of a composition which inhibits the expression or activity of a polypeptide encoded by any one of the nucleic acid molecules of the invention. In preferred embodiments, the pathogen is Pseudomonas aeruginosa, such as PA14. In this regard, the composition may inhibit binding of the pathogen to a cell or cell-surface protein in the mammal. For example, the composition may contain an antibody that specifically binds the protein of the invention or a fragment thereof.

[0023] In yet another aspect, the invention features a method of treating a pathogenic infection in a mammal, involving (a) identifying a mammal having a pathogenic infection; and (b) administering to the mammal a therapeutically effective amount of a composition which binds and inhibits a polypeptide encoded by any one of the amino acid sequences of the invention. In preferred embodiments, the pathogenic infection is caused by Pseudomonas aeruginosa, e.g., PA14.

[0024] The invention further provides a method of treating a pathogenic infection in a mammal, involving (a) identifying a mammal having a pathogenic infection; and (b) administering to the mammal a therapeutically effective amount of a composition which inhibits the expression an mRNA molecule transcribed from any one of the nucleic acid molecules of the invention. In preferred embodiments, the pathogen is Pseudomonas aeruginosa, such as PA14.

[0025] In another aspect, the invention provides a method for preventing, stabilizing, or treating a pathogenic infection in a mammal by introducing into the mammal a nucleic acid of the invention or a complement thereof in an amount sufficient to specifically attenuate expression of a target nucleic acid (e.g., an mRNA) of a pathogen. The introduced nucleic acid has a nucleotide sequence that is essentially complementary (e.g., at least 20, 30, 40, 50, 60, 70, 80, 90, 95, 98, or 100% complementary) to a region of desirably at least 20 nucleotides of the target nucleic acid. According to this invention, the nucleic acid that is introduced in the mammal or the protein encoded by this nucleic acid may induce an immune response against the pathogen. Alternatively, the protein encoded by such a nucleic acid molecule may inhibit binding of the pathogen to a cell or a cell-surface protein in the mammal. Optionally, the mammal being treated may be directly administered with a therapeutically effective amount of a protein of the invention or a fragment thereof.

[0026] In desirable embodiments of the therapeutic methods of the above aspects, the mammal is a human. Other exemplary mammals include primates such as monkeys, animals of veterinary interest (e.g., cows, sheep, goats, buffalos, and horses), and domestic pets (e.g., dogs and cats). In some embodiments, the introduced nucleic acid is single stranded or double stranded (e.g., double stranded RNA).

[0027] In all foregoing aspects of the invention, the nucleic acid or polypeptide is involved in biofilm formation, surface adhesion, host invasion, toxin production, pili assembly, and/or fimbrial biogenesis. In some embodiments, a compound identified in a screening assay of the invention or administered to a mammal in a therapeutic method of the invention inhibits biofilm formation, surface adhesion, host invasion, toxin production, pili assembly, and/or fimbrial biogenesis, preferably by at least 10, 20, 30, 40, 50, 60, 70, 80, 90, 95, or 100% compared to a buffer control.

[0028] With respect to the therapeutic methods of the invention, it is not intended that the administration of compounds to a mammal be limited to a particular mode of administration, dosage, or frequency of dosing; the present invention contemplates all modes of administration, including oral, intraperitoneal, intramuscular, intravenous, intraarticular, intralesional, subcutaneous, or any other route sufficient to provide a dose adequate to prevent or treat an infection. One or more compounds may be administered to the mammal in a single dose or multiple doses. When multiple doses are administered, the doses may be separated from one another by, for example, one week, one month, one year, or ten years. It is to be understood that, for any particular subject, specific dosage regimes should be adjusted over time according to the individual need and the professional judgment of the person administering or supervising the administration of the compositions. If desired, conventional treatments can be used in combination with the compounds of the present invention.

[0029] Suitable carriers include, but are not limited to, saline, buffered saline, dextrose, water, glycerol, ethanol, and combinations thereof. The composition can be adapted for the mode of administration and can be in the form of, for example, a pill, tablet, capsule, spray, powder, or liquid. In some embodiments, the pharmaceutical composition contains one or more pharmaceutically acceptable additives suitable for the selected route and mode of administration. These compositions may be administered by, without limitation, any parenteral route including intravenous, intra-arterial, intramuscular, subcutaneous, intradermal, intraperitoneal, intrathecal, as well as topically, orally, and by mucosal routes of delivery such as intranasal, inhalation, rectal, vaginal, buccal, and sublingual. In some embodiments, the pharmaceutical compositions of the invention are prepared for administration to vertebrate (e.g., mammalian) subjects in the form of liquids, including sterile, non-pyrogenic liquids for injection, emulsions, powders, aerosols, tablets, capsules, enteric-coated tablets, or suppositories.

[0030] Proteins substantially identical to any of the proteins of the invention (e.g., proteins having an amino acid sequence of SEQ ID NOs: 127-229 and SEQ ID NOs: 278-280) and nucleic acids substantially identical to any of the nucleic acids of the invention (e.g., nucleic acids having an nucleotide sequence of SEQ ID NOs: 1-108, SEQ ID NOs: 119-120, and SEQ ID NOs: 281-282) can be used in any of the various aspects of the invention.

[0031] In a further aspect, the present invention features a method of diagnosing a pathogenic infection in a mammal by detecting the presence of the nucleic acid or the protein of the invention in the mammal.

[0032] The invention further provides a method of determining whether a bacterium is pathogenic by detecting the presence of the nucleic acid or the protein of the invention in the bacteria. In all foregoing aspects of the invention, the nucleic acid and protein of the invention may be detected by means of a nucleic acid, a probe, or an antibody.

[0033] The invention also features a method of generating an antibody by (a) immunizing an animal with the protein of the invention or a fragment thereof; and (b) isolating an antibody that specifically binds such a protein or fragment. Optionally, the antibody inhibits the binding of a mammalian or plant protein to the protein of the invention.

[0034] The invention further features a method for identifying a virulence factor of a pathogen, involving the steps of: (a) contacting a factor from the pathogen with a protein having an amino acid sequence at least 25% identical to any one of the amino acid sequences of SEQ ID NOs: 269-277 under conditions that allow binding; and (b) detecting binding of this factor to the protein, thereby determining whether the factor is a virulence factor. Alternatively, the invention also provides a method for identifying a compound that inhibits virulence of a pathogen, including the steps of: (a) contacting a candidate compound, a factor from the pathogen, and a protein having an amino acid sequence at least 25% identical to any one of the amino acid sequences of SEQ ID NOs: 269-277 under conditions that allow binding; and (b) measuring the binding of the factor to the protein, such that a decrease in binding effected by the candidate compound indicates that the candidate compound inhibits the virulence of the pathogen. Preferably, the pathogen is Pseudomonas aeruginosa.

[0035] In yet another aspect, the invention features a method of diagnosing a Pseudomonas or Pseudomonas-related infection in a mammal by detecting binding of a sample from the mammal to a protein containing any one of the amino acid sequences of SEQ ID NOs: 269-277.

[0036] In yet another related aspect, the invention provides a method for delivering a molecule to the lungs of a mammal by administering a molecule bound to a protein of the invention to the mammal under conditions that allow the protein to target the molecule to the lungs of the mammal.

[0037] The present invention also provides a method for delivering a protein of interest to the lungs of a mammal by administering a fusion protein that contains a protein of the invention as well as a protein of interest to the mammal under conditions that allow the fusion protein to target the protein of interest to the lungs of the mammal.

[0038] By “isolated nucleic acid molecule” is meant a nucleic acid (e.g., a DNA) that is free of the genes which, in the naturally occurring genome of the organism from which the nucleic acid molecule of the invention is derived, flank the gene. The term therefore includes, for example, a recombinant DNA that is incorporated into a vector; into an autonomously replicating plasmid or virus; or into the genomic DNA of a prokaryote or eukaryote; or that exists as a separate molecule (for example, a cDNA or a genomic or cDNA fragment produced by PCR or restriction endonuclease digestion) independent of other sequences. In addition, the term includes an RNA molecule which is transcribed from a DNA molecule, as well as a recombinant DNA which is part of a hybrid gene encoding additional polypeptide sequence.

[0039] By “polypeptide” is meant any chain of amino acids, regardless of length or post-translational modification (for example, glycosylation or phosphorylation).

[0040] By a “substantially pure polypeptide” is meant a polypeptide of the invention that has been separated from components which naturally accompany it. Typically, the polypeptide is substantially pure when it is at least 60%, by weight, free from the proteins and naturally occurring organic molecules with which it is naturally associated. Preferably, the preparation is at least 75%, more preferably at least 90%, and most preferably at least 99%, by weight, a polypeptide of the invention. A substantially pure polypeptide of the invention may be obtained, for example, by extraction from a natural source (for example, a pathogen); by expression of a recombinant nucleic acid encoding such a polypeptide; or by chemically synthesizing the protein. Purity can be measured by any appropriate method, for example, column chromatography, polyacrylamide gel electrophoresis, or by HPLC analysis.

[0041] By “substantially identical” is meant a polypeptide or nucleic acid molecule exhibiting at least 25% identity to a reference amino acid sequence (for example, any one of the amino acid sequences described herein) or nucleic acid sequence (for example, any one of the nucleic acid sequences described herein). Preferably, such a sequence is at least 30%, 40%, 50%, 60%, 70%, more preferably 80%, 81%, 82%, 83%, 84%, 85% identical, and most preferably 90%, 92%, 94%, 95%, 96%, 97%, 98%, or even 99% identical at the amino acid level or nucleic acid to the sequence used for comparison.

[0042] Sequence identity is typically measured using sequence analysis software (for example, Sequence Analysis Software Package of the Genetics Computer Group, University of Wisconsin Biotechnology Center, 1710 University Avenue, Madison, Wis. 53705, BLAST, BESTFIT, GAP, or PILEUP/PRETTYBOX programs). Such software matches identical or similar sequences by assigning degrees of homology to various substitutions, deletions, and/or other modifications. Conservative substitutions typically include substitutions within the following groups: glycine, alanine; valine, isoleucine, leucine; aspartic acid, glutamic acid, asparagine, glutamine; serine, threonine; lysine, arginine; and phenylalanine, tyrosine. In an exemplary approach to determining the degree of identity, a BLAST program may be used, with a probability score between e⁻³ and e⁻¹⁰⁰ indicating a closely related sequence.

[0043] By “transformed cell” is meant a cell into which (or into an ancestor of which) has been introduced, by means of recombinant DNA techniques, a DNA molecule encoding (as used herein) a polypeptide of the invention.

[0044] By “positioned for expression” is meant that the DNA molecule is positioned adjacent to a DNA sequence which directs transcription and translation of the sequence (i.e., facilitates the production of, for example, a recombinant polypeptide of the invention, or an RNA molecule).

[0045] By “purified antibody” is meant antibody which is at least 60%, by weight, free from proteins and naturally-occurring organic molecules with which it is naturally associated. Preferably, the preparation is at least 75%, more preferably 90%, and most preferably at least 99%, by weight, antibody. A purified antibody of the invention may be obtained, for example, by affinity chromatography using a recombinantly produced polypeptide of the invention and standard techniques.

[0046] By “specifically binds” is meant a compound or antibody which recognizes and binds a polypeptide of the invention but which does not substantially recognize and bind other molecules in a sample, for example, a biological sample, which naturally includes a polypeptide of the invention.

[0047] By “derived from” is meant isolated from or having the sequence of a naturally-occurring sequence (e.g., a cDNA, genomic DNA, synthetic, or combination thereof).

[0048] By “inhibiting a pathogen” is meant the ability of a candidate compound to decrease, suppress, attenuate, diminish, or arrest the development or progression of a pathogen-mediated disease or an infection in a eukaryotic host organism. Preferably, such inhibition decreases pathogenicity by at least 5%, more preferably by at least 25%, and most preferably by at least 50%, as compared to symptoms in the absence of the candidate compound in any appropriate pathogenicity assay (for example, those assays described herein). In one particular example, inhibition may be measured by monitoring pathogenic symptoms in a host organism exposed to a candidate compound or extract, a decrease in the level of symptoms relative to the level of pathogenic symptoms in a host organism not exposed to the compound indicating compound-mediated inhibition of the pathogen.

[0049] By “pathogenic virulence factor” is meant a cellular component (e.g., a protein such as a transcription factor, as well as the gene which encodes such a protein) without which the pathogen is incapable of causing disease or infection in a eukaryotic host organism.

[0050] By “antisense” is meant a nucleic acid, regardless of length, that is complementary to a coding strand or mRNA of the invention. In some embodiments, the antisense molecule inhibits the expression of only one nucleic acid, and in other embodiments, the antisense molecule inhibits the expression of more than one nucleic acid. Desirably, the antisense nucleic acid decreases the expression or biological activity of a nucleic acid or protein of the invention by at least 20, 40, 50, 60, 70, 80, 90, 95, or 100%. An antisense molecule can be introduced, e.g., to an individual cell or to whole animals, for example, it may be introduced systemically via the bloodstream. Desirably, a region of the antisense nucleic acid or the entire antisense nucleic acid is at least 70, 80, 90, 95, 98, or 100% complimentary to a coding sequence, regulatory region (5′ or 3′ untranslated region), or an mRNA of interest. Desirably, the region of complementarity includes at least 5, 10, 20, 30, 50, 75, 100, 200, 500, 1000, 2000, or 5000 nucleotides or includes all of the nucleotides in the antisense nucleic acid.

[0051] In some embodiments, the antisense molecule is less than 200, 150, 100, 75, 50, or 25 nucleotides in length. In other embodiments, the antisense molecule is less than 50,000; 10,000; 5,000; or 2,000 nucleotides in length. In certain embodiments, the antisense molecule is at least 200, 300, 500, 1000, or 5000 nucleotides in length. In some embodiments, the number of nucleotides in the antisense molecule is contained in one of the following ranges: 5-15 nucleotides, 16-20 nucleotides, 21-25 nucleotides, 26-35 nucleotides, 36-45 nucleotides, 46-60 nucleotides, 61-80 nucleotides, 81-100 nucleotides, 101-150 nucleotides, or 151-200 nucleotides, inclusive. In addition, the antisense molecule may contain a sequence that is less than a full-length sequence or may contain a full-length sequence.

[0052] By “double stranded RNA” is meant a nucleic acid containing a region of two or more nucleotides that are in a double stranded conformation. In various embodiments, the double stranded RNA consists entirely of ribonucleotides or consists of a mixture of ribonucleotides and deoxynucleotides. The double stranded RNA may be a single molecule with a region of self-complementary such that nucleotides in one segment of the molecule base pair with nucleotides in another segment of the molecule. Alternatively, the double stranded RNA may include two different strands that have a region of complementarity to each other. Desirably, the regions of complementarity are at least 70, 80, 90, 95, 98, or 100% complimentary. Desirably, the region of the double stranded RNA that is present in a double stranded conformation includes at least 5, 10, 20, 30, 50, 75, 100, 200, 500, 1000, 2000 or 5000 nucleotides or includes all of the nucleotides in the double stranded RNA. Desirable double stranded RNA molecules have a strand or region that is at least 70, 80, 90, 95, 98, or 100% identical to a coding region or a regulatory sequence (e.g., a transcription factor binding site, a promoter, or a 5′ or 3′ untranslated region) of a nucleic acid of the invention. In some embodiments, the double stranded RNA is less than 200, 150, 100, 75, 50, or 25 nucleotides in length. In other embodiments, the double stranded RNA is less than 50,000; 10,000; 5,000; or 2,000 nucleotides in length. In certain embodiments, the double stranded RNA is at least 200, 300, 500, 1000, or 5000 nucleotides in length. In some embodiments, the number of nucleotides in the double stranded RNA is contained in one of the following ranges: 5-15 nucleotides, 16-20 nucleotides, 21-25 nucleotides, 26-35 nucleotides, 36-45 nucleotides, 46-60 nucleotides, 61-80 nucleotides, 81-100 nucleotides, 101-150 nucleotides, or 151-200 nucleotides, inclusive. In addition, the double stranded RNA may contain a sequence that is less than a full-length sequence or may contain a full-length sequence.

[0053] In some embodiments, the double stranded RNA molecule inhibits the expression of only one nucleic acid, and in other embodiments, the double stranded RNA molecule inhibits the expression of more than one nucleic acid. Desirably, the nucleic acid decreases the expression or biological activity of a nucleic acid or protein of the invention by at least 20, 40, 50, 60, 70, 80, 90, 95, or 100%. A double stranded RNA can be introduced, e.g., to an individual cell or to whole animals, for example, it may be introduced systemically via the bloodstream.

[0054] In various embodiments, the double stranded RNA or antisense molecule includes one or more modified nucleotides in which the 2′ position in the sugar contains a halogen (such as fluorine group) or contains an alkoxy group (such as a methoxy group) which increases the half-life of the double stranded RNA or antisense molecule in vitro or in vivo compared to the corresponding double stranded RNA or antisense molecule in which the corresponding 2′ position contains a hydrogen or an hydroxyl group. In yet other embodiments, the double stranded RNA or antisense molecule includes one or more linkages between adjacent nucleotides other than a naturally-occurring phosphodiester linkage. Examples of such linkages include phosphoramide, phosphorothioate, and phosphorodithioate linkages.

[0055] The invention provides a number of targets that are useful for the development of drugs that specifically block the pathogenicity of a microbe, for example, Pseudomonas aeruginosa PA14. In addition, the methods of the invention provide a facile means to identify compounds that are safe for use in eukaryotic host organisms (i.e., compounds which do not adversely affect the normal development and physiology of the organism), and efficacious against pathogenic microbes (i.e., by suppressing the virulence of a pathogen). In addition, the methods of the invention provide a route for analyzing virtually any number of compounds for an anti-virulence effect with high-volume throughput, high sensitivity, and low complexity. The methods are also relatively inexpensive to perform and enable the analysis of small quantities of active substances found in either purified or crude extract form.

[0056] Other features and advantages of the invention will be apparent from the detailed description, and from the claims.

### BRIEF DESCRIPTION OF THE DRAWINGS

[0057] FIGS. 1A-AB show a polynucleotide sequence including 10,848 base pairs of PAPI-2 (SEQ ID NO: 1), the small pathogenicity island of Pseudomonas aeruginosa PA14 described herein.

[0058] FIGS. 2A-2P show a polynucleotide sequence including 84,830 base pairs of PAPI-1 (SEQ ID NO: 2), the large pathogenicity island of Pseudomonas aeruginosa PA14 described herein.

[0059] FIG. 3 is the polynucleotide sequence (SEQ ID NO: 3) and the translated amino acid sequence (SEQ ID NO: 127) of ORF RL024.

[0060] FIG. 4 is the polynucleotide sequence (SEQ ID NO: 4) and the translated amino acid sequence (SEQ ID NO: 128) of ORF RL025.

[0061] FIG. 5 is the polynucleotide sequence (SEQ ID NO: 5) and the translated amino acid sequence (SEQ ID NO: 129) of ORF RL026.

[0062] FIG. 6 is the polynucleotide sequence (SEQ ID NO: 6) and the translated amino acid sequence (SEQ ID NO: 130) of ORF RL027.

[0063] FIG. 7 is the polynucleotide sequence (SEQ ID NO: 7) and the translated amino acid sequence (SEQ ID NO: 131) of ORF RL028.

[0064] FIG. 8 is the polynucleotide sequence (SEQ ID NO: 8) and the translated amino acid sequence (SEQ ID NO: 132) of ORF RL029.

[0065] FIG. 9 is the polynucleotide sequence (SEQ ID NO: 9) and the translated amino acid sequence (SEQ ID NO: 133) of ORF RL030.

[0066] FIG. 10 is the polynucleotide sequence (SEQ ID NO: 10) and the translated amino acid sequence (SEQ ID NO: 134) of ORF RL031.

[0067] FIG. 11 is the polynucleotide sequence (SEQ ID NO: 11) and the translated amino acid sequence (SEQ ID NO: 135) of ORF RL032.

[0068] FIG. 12 is the polynucleotide sequence (SEQ ID NO: 12) and the translated amino acid sequence (SEQ ID NO: 136) of ORF RL033.

[0069] FIG. 13 is the polynucleotide sequence (SEQ ID NO: 13) and the translated amino acid sequence (SEQ ID NO: 137) of ORF RL034.

[0070] FIG. 14 is the polynucleotide sequence (SEQ ID NO: 14) and the translated amino acid sequence (SEQ ID NO: 138) of ORF RL035.

[0071] FIG. 15 is the polynucleotide sequence (SEQ ID NO: 15) and the translated amino acid sequence (SEQ ID NO: 139) of ORF RL036.

[0072] FIG. 16 is the polynucleotide sequence (SEQ ID NO: 16) and the translated amino acid sequence (SEQ ID NO: 140) of ORF RL037.

[0073] FIG. 17 is the polynucleotide sequence (SEQ ID NO: 17) and the translated amino acid sequence (SEQ ID NO: 141) of ORF RL038.

[0074] FIG. 18 is the polynucleotide sequence (SEQ ID NO: 18) and the translated amino acid sequence (SEQ ID NO: 142) of ORF RL039.

[0075] FIG. 19 is the polynucleotide sequence (SEQ ID NO: 19) and the translated amino acid sequence (SEQ ID NO: 143) of ORF RL040.

[0076] FIG. 20 is the polynucleotide sequence (SEQ ID NO: 20) and the translated amino acid sequence (SEQ ID NO: 144) of ORF RL041.

[0077] FIG. 21 is the polynucleotide sequence (SEQ ID NO: 21) and the translated amino acid sequence (SEQ ID NO: 145) of ORF RL042.

[0078] FIG. 22 is the polynucleotide sequence (SEQ ID NO: 22) and the translated amino acid sequence (SEQ ID NO: 146) of ORF RL043.

[0079] FIG. 23 is the polynucleotide sequence (SEQ ID NO: 23) and the translated amino acid sequence (SEQ ID NO: 147) of ORF RL044.

[0080] FIG. 24 is the polynucleotide sequence (SEQ ID NO: 24) of ORF RL045.

[0081] FIG. 25 is the polynucleotide sequence (SEQ ID NO: 25) and the translated amino acid sequence (SEQ ID NO: 148) of ORF RL046.

[0082] FIG. 26 is the polynucleotide sequence (SEQ ID NO: 26) and the translated amino acid sequence (SEQ ID NO: 149) of ORF RL047.

[0083] FIG. 27 is the polynucleotide sequence (SEQ ID NO: 27) and the translated amino acid sequence (SEQ ID NO: 150) of ORF RL048.

[0084] FIG. 28 is the polynucleotide sequence (SEQ ID NO: 28) and the translated amino acid sequence (SEQ ID NO: 151) of ORF RL049.

[0085] FIG. 29 is the polynucleotide sequence (SEQ ID NO: 29) and the translated amino acid sequence (SEQ ID NO: 152) of ORF RL050.

[0086] FIGS. 30A-30V show the polynucleotide sequences (SEQ ID NOs: 30-94) and the translated amino acid sequences (SEQ ID NOs: 153-215) of ORF RL051 to ORF RL115.

[0087] FIGS. 31A-31E shows the polynucleotide sequences (SEQ ID NOs: 95-109 and SEQ ID NO: 282) and the translated amino acid sequences (SEQ ID NOs: 216-229) of RS01 to RS15.

[0088] FIG. 32 is a table showing the nucleotide homology between regions of PAPI-1, the big island of pathogenicity (84, 830 bps) and other virulence factors.

[0089] FIG. 33 is a table showing the nucleotide homology between regions of PAPI-2, the small island of pathogenicity (10, 848 bps) and other virulence factors.

[0090] FIGS. 34A-34G represent a table showing the nucleotide homology between regions belonging to the various ORFs of the big pathogenicity island and other known proteins, including virulence factors.

[0091] FIG. 35 is an alignment of clone 2 with Homo sapiens mRNA EST DKFZp566K094_r1 (from clone DKFZp566) (SEQ ID NOs: 230-232).

[0092] FIG. 36 is an alignment of clone 8 with EST01285 subtracted hippocampus (Stratagene, cat. #936205) (SEQ ID NOs: 233-235).

[0093] FIG. 37 is an alignment of clone 47 with fibrillin 1 precursor (SEQ ID NOs: 236-238).

[0094] FIG. 38 is an alignment of clone 56 with emilin precursor (SEQ ID NOs: 239-244).

[0095] FIG. 39 is an alignment of clone 59 with a fragment of pironly|A35763|A35763 collagen alpha 2 chain—sea urchin (Paracentrotus lividus) (SEQ ID NOs: 245-250).

[0096] FIG. 40 is an alignment of clone 60/63 with transcobalamin II precursor (SEQ ID NOs: 251-259).

[0097] FIG. 41 is an alignment of clone 65 with human fibulin-1 precursor (SEQ ID NOs: 260-262).

[0098] FIG. 42 is an alignment of clone 80 with trembl|AF045447|AF045447_{—}1 deleted in pancreatic carcinoma (DPC4) (SEQ ID NOs: 263-265).

[0099] FIG. 43 is an alignment of clone 86 with the cell surface protein Notch2 (SEQ ID NOs: 266-268).

[0100] FIG. 44 is the polynucleotide sequence (SEQ ID NO: 109) and the translated amino acid sequence (SEQ ID NO: 269) of a human lung nucleic acid molecule.

[0101] FIG. 45 is the polynucleotide sequence (SEQ ID NO: 110) and the translated amino acid sequence (SEQ ID NO: 270) of a human lung nucleic acid molecule.

[0102] FIG. 46 is the polynucleotide sequence (SEQ ID NO: 111) and the translated amino acid sequence (SEQ ID NO: 271) of a human lung nucleic acid molecule.

[0103] FIG. 47 is the polynucleotide sequence (SEQ ID NO: 112) and the translated amino acid sequence (SEQ ID NO: 272) of a human lung nucleic acid molecule.

[0104] FIG. 48 is the polynucleotide sequence (SEQ ID NO: 113) and the translated amino acid sequence (SEQ ID NO: 273) of a human lung nucleic acid molecule.

[0105] FIG. 49 is the polynucleotide sequence (SEQ ID NO: 114) and the translated amino acid sequence (SEQ ID NO: 274) of a human lung nucleic acid molecule.

[0106] FIG. 50 is the polynucleotide sequence (SEQ ID NO: 115) and the translated amino acid sequence (SEQ ID NO: 275) of a human lung nucleic acid molecule.

[0107] FIG. 51 is the polynucleotide sequence (SEQ ID NO: 116) and the translated amino acid sequence (SEQ ID NO: 276) of a human lung nucleic acid molecule.

[0108] FIG. 52 is the polynucleotide sequence (SEQ ID NOs: 117-118) and the translated amino acid sequence (SEQ ID NO: 277) of a human lung nucleic acid molecule.

[0109] FIG. 53 is a table that lists P. aeruginosa strains containing a nucleic acid that hybridized to a nucleic acid probe of the invention (i.e., a probe containing a region of a nucleic acid of the invention).

[0110] FIG. 54 is the translated amino acid sequence of ORF7 (SEQ ID NO: 278).

[0111] FIG. 55 is the polynucleotide sequence of ORF7 (SEQ ID NO: 119).

[0112] FIG. 56 is the translated amino acid sequence of clpB (SEQ ID NO: 279)

[0113] FIG. 57 is the polynucleotide sequence of clpB (SEQ ID NO: 120).

[0114] FIG. 58 is a table showing the nucleotide homology between regions belonging to the various ORFs of the small pathogenicity island and other known proteins, including virulence factors.

[0115] FIGS. 59A and 59B are schematic diagrams showing the alignment of the PA14 and PAO1 genomes.

[0116] FIGS. 60A and 60B are schematic diagrams showing the organization of the PAPI-1 and PAPI-2 elements, respectively. The boxes with arrows represent individual ORFs and their transcriptional orientations. Empty boxes represent pseudogenes, triangles correspond to tRNA genes, and the marked vertical line corresponds to the PAPI-1 and PAPI-2 attR. The numbered lines represent size (kb), and the coincident rectangles and single or double-headed arrows on the line respectively correspond to direct repeats (DR1-5), inverted repeat (IR), and IS sequences. ORF pattern corresponds and the bacterial species that it is most related to. Also indicated is the predicted protein function of ORFs, such as toxin/secreted factor (A), adhesion/protein secretion (B), regulation (C), DNA recombination/replication (D), hypothetical (E), and unclassified (F). Pathogenesis-related ORFs are indicated by shadowing (double arrow). Functions of gene clusters are marked and correspond to ORFs above the notations. The regions marked with a (*) show the homology between PAPI-1 and PAPI-2.

[0117] FIG. 61 is a diagram showing the presence of PAPI-1 in P. aeruginosa clinical isolates. The upper line represents the PAPI-1 coordinates (kb). The arrowheads indicate the position of the direct repeats (DR). The black rectangles correspond to the probes used for hybridization. (+) denotes positive hybridization; (N) denotes experiment not done. All strains giving positive hybridization are shown.

[0118] FIGS. 62A and 62B show the cosmid clones containing genetic inserts from PAPI-1 and PAPI-2, respectively.

[0119] FIG. 63 is a table showing bacterial strains bearing mutations in PAPI ORFs and their effect on mouse mortality and growth in Arabidopsis leaf.

[0120] FIG. 64 is a table showing the characteristics of direct and inverted repeat sequences in PAPI-1.

[0121] FIG. 65 is a table showing the IS sequences in PAPI-1 and PAPI-2 and the corresponding IS families.

[0122] FIG. 66 is a table showing the correspondence of the type IV B pilus/secretion system in PAPI-1 to the type II secretion systems of P. aeruginosa PA01.

[0123] FIG. 67 represents the amino acid sequence of ORF7 showing the additional 14 amino acids (SEQ ID NO: 280). Also shown is the corresponding nucleic acid sequence (SEQ ID NO: 281).

[0124] FIG. 68 represents the regulatory region of ORF7 (SEQ ID NO: 121) showing the two putative transcription start sites originating from the region inside PAPI-1. The arrows indicate the transcription start sites determined by primer extension experiments, with their position in relation to the translational start site, which is the boxed TTG. The −10 and −35 predicted regions of each promoter are shown in a shadowed box or empty box. Capital letters within the box indicate that the specific nucleotide is present in the consensus sequence of σ⁷⁰ dependent promoters. Underlined sequences correspond to tRNA genes codified by the opposite DNA strand. The sequence upstream of the highlighted “T” is not present in the PAO1 genome, indicating the beginning of the PA14 large pathogenicity island PAPI-1.

[0125] FIG. 69 is a photograph of an agarose gel electrophoresis of the PCR products obtained using as a template the genomic DNA of the strains indicated. M corresponds to the size marker.

[0126] FIGS. 70A-70B represent multiple sequence alignments (SEQ ID NOs: 122-126) of all PCR products using the Clustal W software.

### DETAILED DESCRIPTION

[0127] In general, the methods and compositions featured in the present invention are based on our discovery of pathogenicity islands harboring novel plant and animal virulence genes.

[0128] The versatile and ubiquitous bacterium Pseudomonas aeruginosa is the quintessential opportunistic pathogen, as it can infect a broad range of hosts, from amoeba to humans (Pukatzki et al., Proc Nail Acad Sci USA (2002) 99:3159-3164, and Rahme et al., Proc Natl Acad Sci USA (2000) 97:8815-8821), where it is found associated with severe burns, cystic fibrosis (CF), AIDS, or cancer (Govan et al., Microbiol. Rev. (1996) 60:539-574, and Bodey et al., Rev. Infect. Dis. (1983) 5:279-313). This pathogen produces an arsenal of virulence factors (Lyczak et al., Microbes Infect. (2000) 2:1051-1060) and displays a remarkable range of virulence, from weakly virulent isolates, to isolates that infect just a few organisms, to very broad spectrum isolates, exemplified by the clinical isolate PA14 (Rahme et al., Proc Natl Acad Sci USA (2000) 97:8815-21, Lau et al, Infect Immun (2003) 71:4059-4066 and Rahme et al., Science (1995) 268:1899-902.). Until now, the genomic basis of the promiscuity underlying the mechanisms of pathogenesis and defense of P. aeruginosa, as well as the origin, evolution, and utilization of such mechanisms by other infectious microorganisms has remained elusive.

[0129] Bacterial genomes are arranged in blocks of core sequences and genomic islands (Hacker et al., Annu Rev Microbiol (2000) 54:641-79, Parkhill et al., Nature (2001) 413:848-852, and Welch et al., Proc Natl Acad Sci USA (2002) 99:17020-17024). Genomic islands can greatly differ in their G+C content and can encode a variety of accessory activities that underlie specializations such as symbiotic and pathogenesis functions. Different genes carried by a single island often have diverse origins and blocks are built piecemeal through insertion and deletion events. Because genomic islands are typically acquired and exchanged by lateral gene transfer and are found in widely divergent species, it is often difficult to ascribe their initial origins. Pathogenicity islands, in particular, are specialized genomic islands that encode virulence factors. Their recent characterization in a wide range of pathogenic bacteria has led to the identification of novel virulence factors (e.g., adhesions, toxins, invasions, protein secretion systems, and iron uptake) used by these species to infect their respective hosts (Parkhill et al., Nature (2001) 413:848-852, Parkhill et al., Nature (2001) 413:523-527, Perna et al., Nature (2001) 409:529-533, da Silva et al., Nature (2002) 417:459-463, and Censini et al., Proc. Natl. Acad. Sci. U.S.A. (1996) 93:14648-14653.). Usually pathogenicity islands encompass large genomic regions (e.g., 10-200 kilobases) that are present on the genomes of pathogenic strains but absent from the genomes of nonpathogenic strains.

[0130] The present invention is based, in part, on the identification, sequencing, and characterization of two novel virulence islands of P. aeruginosa strain PA14, namely the P. aeruginosa pathogenicity island-1 (PAPI-1) (large pathogenicity island, GenBank Accession Number AY273869 and SEQ ID NO: 2) and PAPI-2 (small pathogenicity island, GenBank Accession Number AY273870 and SEQ ID NO: 1). While the PAPI-1 is element is absent from the reference bacterial strain PAO1, a portion of the PAPI-2 element is found in this isolate. Our studies show that both islands (sequences are shown in FIGS. 1 and 2 as SEQ ID NO: 2 and SEQ ID NO: 1, respectively) contain novel virulence-associated factors involved in biofilm formation, surface adhesion, host invasion, toxin production, pili assembly, and/or fimbrial biogenesis. Exemplary genes (SEQ ID NOs: 1-108, SEQ ID NOs: 119-120, and SEQ ID NOs: 281-282) and their translation products are described in FIGS. 3-31 and 54-57 (SEQ ID NOs: 127-229 and SEQ ID NOs: 278-280). FIGS. 32-34 and 58 describe many other characteristics and functions of the nucleic acids and proteins of the invention. FIG. 53 further demonstrates that these nucleic acids are found within a variety of pathogenic P. aeruginosa strains. Furthermore, the encoded proteins play an important role in the pathogenesis of P. aeruginosa. Interestingly, most of the predicted proteins encoded by the PAPI genes share no homology with any proteins of known function. By mutating several of these genes, we demonstrate their relevance both in plant and animal pathogenicity. Thus, based on our results, PAPI-1 and PAPI-2 virulence factors promote the broad host promiscuity of highly virulent P. aeruginosa strains, such as PA14, relative to less virulent strains such as PAO1. Furthermore, our results provide support for the implication of the modular structure of pathogenicity islands in the evolution, relatedness to other bacterial species, and the generation of pathogenic variants.

[0131] In addition to novel genes, these islands further contain a number of genes encoding for transposases, helicases, inverted repeats, and tRNA sequences at the borders of these islands, confirming that these genomic regions correspond to genomic islands. PAPI-1, the big pathogenicity island, contains 115 ORFs, 92 of which are described herein and the remainder are described in “Virulence-Associated Nucleic Acid Sequences and Uses Thereof,” U.S. Pat. No. 6,355,411, issued Mar. 12, 2002. PAPI-2, the small PA14 pathogenicity island described herein contains 15 ORFs. The only homology between these islands occurs with the PAPI-1 ORFs RL003 and RL059, which are homologous to PAPI-2 ORFs RS03 and RS12, respectively.

[0132] Identification of Two Genomic Islands in PA14 and Absent from PAO1

[0133] The PA14 isogenic mutant 33A9, which carries an RL003 gene mutation, exhibits reduced plant and mouse pathogenicity (Rahme et al., Proc Natl Acad Sci USA (1997) 94:13245-50). The fact that RL003 is absent from PAO1 is highly suggestive that it might occur within a P. aeruginosa pathogenicity island. Thus, we screened a PA14 cosmid library with a 300 bp RL003 probe. Initial results with the cosmids pA113, pB104, p148, pH44, and pG68 (as shown in FIGS. 62A and 62B) showed that only pA113, pB104 and pI48 overlap. Although both borders of pH44 and pG68 contain PAO1 sequences, only the left borders of pA113, pB104 and pI48 carry PAO1 DNA, indicating that RL003 occurs in at least two sites in the PA14 genome, one of which includes a large genomic block.

[0134] To further define this block, we carried out a progressive cosmid walk, starting with a p148 probe that contains the PAO1/PA14 left junction, and identified a cosmid carrying the right PA14/PAO1 junction (FIG. 62A). A set of five cosmid clones, p148, pG22, pSK91, pSK24 and pF62, were assembled to define a contiguous 150 kb region, designated PAPI-1, found in PA14 and absent from PAO1 (FIGS. 59A and 62A). Similarly, using probes that correspond to the right and left borders of pH44, we confirmed that this cosmid does not overlap PAPI-1, demonstrating that a second copy of RL003 occurs on a smaller PA14 genomic block, designated PAPI-2 (FIGS. 59B and 62B).

[0135] PAPI-1, the Large Pathogenicity Island

[0136] Comparison of the nucleotide sequence of the region defined by the five PAPI-1 cosmids (annotated in FIGS. 34 and 60A) with the PAO1 genome (Stover et al, Nature (2000) 406:959-64), shows that the 20 kb (GenBank Accession Number AY273871) left end of pI48 is collinear with the PAO1 genome, while the internal 107,899 bp are unique to PA14 (FIGS. 59A and 60A). This 108 kb region has all the features of a genomic island: it occupies a block absent from several P. aeruginosa strains (FIG. 61); its G+C content (59.7%) is different than that of the core genome (66.6%); it is associated with tRNA genes, as a tRNA^{ASn}, tRNA^{Pro} and tRNA^{Lys} gene cluster (annotated as PA4541.1-3 in PAO1) occurs at its leftward PAO1/PA14 junction, and a 58 bp direct repeat of the 3′ half of the tRNA^{Lys} gene, designated attR, occurs just within its right border, such that it is bounded by 58 bp direct repeats (FIGS. 59A, 59B, and 60A); it contains seven mobility factor genes that encode integrases and transposases, plus four related pseudogenes and direct and inverted repeat sequences (FIG. 64); it appears to have undergone deletions in different P. aeruginosa strains and/or additional insertions have occurred in PA14 (FIG. 61, and described below); and finally, it carries at least 19 virulence factors that occur on genomic islands found in a wide spectrum of other pathogenic bacteria (FIGS. 58 and 63).

[0137] Functional organization and predicted ORFs of PAPI-1

[0138] Data in FIGS. 34, 60A, and 60B illustrate the highly modular organization and complex origin of PAPI-1, which is inserted in a hypervariable region of the P. aeruginosa genome near the PA4525 pilA gene (Spencer et al., J Bacteriol (2003) 185:1316-1325, and Wolfgang et al., Proc Natl Acad Sci USA (2003) 100:8484-8489). Remarkably, more than 80% of its DNA sequence is unique and shares no similarity with any GenBank sequence. Furthermore, 75 out of its 115 predicted ORFs are unrelated to previously identified proteins or functional domains, and thus cannot be assigned any function by homology.

[0139] Conversely, 40 PAPI-1 ORFs translated sequences show homology to proteins from several bacterial species, demonstrating its modular evolution. For instance, 18 PAPI-1 genes display significant homology to pathogenicity-related genes, including a putative type III effector (RL030), a type IVB-like pilus gene cluster (RL077-86), and a chaperone/usher pathway (cup) gene cluster (RL040-44) (FIGS. 34, 60A, and 60B). In this regard, at least two different two-component regulatory systems, RL036-RL037 and RL038-RL039, are included in PAPI-1 (see, for example, FIG. 2). The predicted amino acid sequence of the RL036 and RL038 show high similarity to the RcsC cognate sensor of the RscB of Salmonella enterica subsp. enterica serovar Typhi CT18 based on the presence of a conserved response regulator receiver domain and a histidine kinase-like ATPase domain. The Salmonella RcsB-RcsC regulatory system modulates the expression of invasion proteins, flagellin, and Vi antigen in response to osmolarity (Arricau et al., Mol. Microbiol. (1998) 29: 835-50). In E. coli, targets regulated by the RcsCB system include the exopolysaccharide synthesis genes cps, cell division genes, the osmoregulated gene osmC and genes involved in motility and chemotaxis as well is essential to overcome chlorpromazine-induced stress (Conter et al., J. Bacteriol. (2002) 184: 2850-3). The predicted amino acid sequence of RL039 shows high similarity to the RcsB response regulator of the Salmonella enterica RcsCB system. RL039 contains a response regulator receiver domain, a helix-turn-helix-regulatory motif, and the GerE domain as found in the RcsB. The predicted amino acid sequence of RL037 encodes the PvrR protein, which is involved in Pseudomonas biofilm formation and antibiotic resistence of strain PA14 (Drenkard and Ausubel, Nature (2002) 416: 740-3). The predicted amino acid sequences of ORFs RL040-44 show significant similarity to the cluster of P. aeruginosa CupA gene cluster (PA2128-32) of P. aeruginosa strain PAO1. These genes include components of a chaperone/usher pathway that is involved in assembly of fimbrial subunits in other microorganisms. Such a cluster is also present in the P. aeruginosa strain PAK. Additionally, it has been demonstrated that cups genes are involved in biofilm formation (Vallet et al., Proc Natl Acad Sci USA. (2001) 98: 6911-6). The predicted amino acid sequences of ORFs RL077-86 show high similarity to a type IV biosynthetic pili gene cluster of Salmonella and E. Coli. Pili genes are important for adhesion and biofilm formation. Furthermore, RL011 contains a ParE domain (COG3668), RL012 contains a transcriptional regulator domain (COG3609), RL020 contains a DsbG domain, RL102 contains a ParBC domain, and RL 103 contains an Arc domain (transcriptional repressor). The majority of the remaining PAPI-1 genes that can have a function assigned by homology encode functions related to DNA mobilization, integration and partition activities. Many PAPI-1 predicted proteins are related to sequences found in Salmonella, pathogenic E. coli, Haemophilus somnus, Yersinia pestis, P. aeruginosa, P. syringae, P. fluorescens, Xylella fastidiosa, Burkholderia fungorum and Xanthomonas (FIG. 34). Also, 26 PAPI-1 ORFs translated sequences are similar to predicted proteins on both the 134 kb island of the mammalian pathogen S. enterica (STY4521-4608) (Parkhill et al., Nature (2001) 413:848-852), and the 130 kb island of the phytopathogen X. axonopodis (XAC2171-2286) (da Silva et al., Nature (2002) 417:459-463) (FIGS. 34, 60A, and 60B). Moreover, 21 additional PAPI-1 ORFs show similarity with ORFs from only one of these pathogenicity islands—14 with S. enterica (RL052, 72, 77-79, 81-85) and 7 with X. axonopodis (RL020, 35, 63-65, 67). This complex array of pathogenicity-related genes likely plays a role in the broad host range of PA14.

[0140] Interspersed with its ORFs, PAPI-1 carries at least five pairs of direct repeats (DR), a pair of inverted repeats (IR), and an IS sequence also found in P. putida (Nelson et al., Environ Microbiol (2002) 4:799-808) (FIGS. 60A, 60B, 64, and 65). The 63 bp DR1 repeats, which border the entire PAPI-1 element and are part of the tRNA^{Lys} gene, include the 58 bp attR sequence. A hairpin-like structure thought necessary for DNA insertion (van der Meer et al., Arch Microbiol (2001) 175:79-85) occurs downstream of the right DR1, and this sequence might correspond to the actual PAPI-1 integration site, generating the attR and attL sequences. We note that DR 1-like sequences occur in P. aeruginosa strains C and SG17M genomic islands, and in X. fastidiosa (Larbig et al., J Bacteriol (2002) 184:6665-6680).

[0141] The 662 bp DR2 repeats encode two proteins of unknown function (RL035 and RL046) and may have served as a DNA integration site. The 15 kb region found between these repeats, which encodes 9 predicted ORFs, includes bacterial genes not previously associated with genomic islands, including two pairs of two-component regulatory systems (RL036-37 and RL038-39). RL037 is the pvrR gene (Drenkard et al., Nature (2002) 416:740-3), while RL039 and RL038 share domains with rcsB and rcsC, which respectively encode a response regulator and a sensor protein of animal and plant pathogenic bacteria (Gottesman et al., Mol Microbiol (1991) 5:1599-606, and Virlogeux et al., J Bacieriol (1996) 178:169′-8). resC is involved in Salmonella virulence (Detweiler et al., Mol Microbiol (2003) 48:385-400). Downstream of these regulatory systems lies a putative fimbrial chaperone-usher gene cluster (RL040-44) that is both related and distinct to cup clusters in P. aeruginosa strains PAO1 and PAK (Vallet et al., Proc Natl Acad Sci USA (2001) 98:6911-6), and to similar clusters from S. enterica and Y. pestis (Parkhill et al., Nature (2001) 413:523-527, 34). We designate the PAPI-1 cluster cupD, since its predicted products are less than 70% identical with those of other cup clusters. cup genes assemble adhesive organelles expressed by many pathogenic bacteria which mediate attachment to epithelial cells (Soto et al., J Bacteriol (1999) 181:1059-71), and contribute to initiation of biofilm formation (Vallet et al., Proc Natl Acad Sci USA (2001) 98:6911-6).

[0142] The 248 bp DR3 repeats prescribe a 2.5 kb region of 46.4% G+C, indicating its foreign origin (FIGS. 60A, 60B, and 64). This region contains the RL087-8 genes, which are homologues of PA0984-5 that encode a bacteriocin, pyocin S5, and its immunity protein (Michel-Briand et al., Biochimie (2002) 84:499-510). A pilus biogenesis system (RL077-86) is located just upstream of the left DR3 (FIGS. 60A and 60B). This system resembles type IV group B pili clusters found in other pathogenic bacteria, including the enteropathogenic E. coli bundle-forming pilus, the S. enterica CT18 type IVB pilus, and the V. cholerae toxin-coregulated pilus (Parkhill et al., Nature (2001) 413:848-852, Attridge et al., J Biotechnol. (1999) 73:109-117, Donnenberg et al., Gene (1997) 192:33-38, and Giron et al., (1997) Gene 192, 39-43). Interestingly, the type IV pilus biogenesis machinery is highly homologous to the type II secretion pathways (FIG. 66).

[0143] Both DR4 and DR5 consist of two consecutive direct repeats. These repeats are adjacent to the RL092, RL095, RL102, RL109-11 and RL114 ORFs, which are related to plasmid-encoded replication and recombination functions, suggesting that portions of PAPI-1 might be plasmid-derived. In contrast, only two PAPI-1 ORFs (RL 103 and RL110) are phage-related (FIG. 34). Interestingly, the integrase RL002 and the chromosome-partitioning protein Soj RL 115 genes are located at the ends of the island, similar to the P. aeruginosa clone C islands, suggesting that this island may have an intermediate circular form that integrates into tRNA sequences (Kiewitz et al., Microbiology (2000) 146:2365-2373).

[0144] Finally, FIGS. 34, 60A, and 60B demonstrate that genomic “shuffling” has also contributed to PAPI-1 organization, as the RL001, RL020, RL087 and RL088 ORFs are closely related to the PA0977-87 genes, which are located on a PAO1 genomic island. RL054-56 and RL113 share homology with the PAO1 genes PA2221-8, which also occur in a region having atypical G+C content.

[0145] Overall, PAPI-1 has a highly mosaic structure. It harbors blocks of ORFs related to virulence functions in other human and phytopathogenic bacteria, and ORFs similar to genes found in Archaea and phages, illustrating its diverse foreign origin. The PAPI-1 border regions exemplify this mosaicism. While the right border contains ORFs unrelated to any GenBank sequences, the left border carries ORFs found in Archaea species and in other P. aeruginosa strains (Choi et al., J Bacteriol (2002) 184:952-961). Interestingly, one of these ORFs, RL008, encodes a putative helicase fused to sequences homologous to a PAO1 gene that encodes an unknown function. By mutation analysis, this hybrid ORF encodes a mammalian virulence factor, and thus represents a novel pathogenic function generated via gene fusion.

[0146] The highly modular organization of PAPI-1 demonstrates that it was generated by multiple recombination events, as it carries several unrelated genes and gene clusters. Indeed, a large portion of PAPI-1 is similar to ORF clusters found in the genomes of the phytopathogen X. axonopodis pv. citri (da Silva et al., supra), and the human pathogen S. enterica. ser. Typhi (Parkhill et al., Nature (2001) 413:848-852). This region is interrupted by unrelated ORFs located between repeat sequences, suggesting that a fragment homologous to the X. axonopodis and S. enterica gene blocks may have been acquired by P. aeruginosa as a complete DNA fragment, and later interrupted by the insertion of unrelated fragments. Interestingly, one of these secondarily acquired regions, RL036-39, contains two pairs of two-component regulatory systems, which we showed that affect plant and mammalian pathogenesis. Furthermore, these systems may also regulate genes located on PAPI-1 or on the core genome. Acquisition of regulatory systems and virulence genes from other microorganisms may have contributed to the evolution of P. aeruginosa pathogenic variants to thrive in diverse environments. For instance, the PAPI-1 group B type IV pili genes are related to virulence factors that promote pathogen attachment to host cells. Acquisition of these genes could increase P. aeruginosa host-range by promoting its attachment to novel surfaces, such as different epithelial cells.

[0147] Characterization of the PAPI-2 Pathogenicity Island

[0148] Sequencing of pH44 and pG68, that carry a second copy of RL003, revealed a 10,722 bp region, designated PAPI-2, located near the phnAB genes (FIGS. 59B and 60B), a hypervariable region of the P. aeruginosa genome (Spencer et al., supra, Wolfgang et al., supra, Romling et al., J Mol Biol (1997) 271:386-404). FIG. 60B illustrates the organization of the 15 PAPI-2 predicted ORFs, 7 of which correspond to hypothetical proteins, which by virtue of their location are involved in the pathogenicity of Pseudomonas aeruginosa (FIG. 58). PAPI-2 exhibits features of a genomic island, with a G+C content of 56.4%. It contains multiple predicted mobility functions, including, one integrase gene, four transposase genes, and one related pseudogene (FIG. 58) and has an almost complete IS222 element at its left border as well as a portion of ISPpu14, a putative transposase gene (FIGS. 60B and 65).

[0149] Half of PAPI-2 is homologous to PA0977-0987, an 8.9 kb PAO1 genomic island (Kiewitz et al., Microbiology (2000) 146: 2365-2373), which encodes 11 predicted ORFs (FIG. 60B). Unlike PA0977-0987, PAPI-2 is not associated with an attR site but is located at the same position in the P. aeruginosa core genome (FIG. 59B). Furthermore, these two islands share upstream and downstream sequences, and six ORFs (FIGS. 58, 59, and 60). While the PAO1 island unlike PAPI-2, does not contain the entire RS02 integrase gene, it does have an intact tRNA Ys (attL) at its left border and a corresponding 22 bp direct repeat at its right border (attR) (FIG. 59B). The RS03 predicted product shares homology with the N-terminus of that of RL003, the 33A9 locus (FIG. 58). Interestingly, the 2.5 kb left end of PAPI-2 is identical to the 2.5 kb left end of PAPI-1, from the tRNA^{Lys} gene to RL003 and RS03, respectively (FIGS. 60A and 60B). Finally, the PAO1 pyocin genes PA0984-85 are replaced in PAPI-2 by the cytotoxin exoU gene and its chaperone spcU (RS14-15). exoU is a type III effector that plays an important role in pathogenesis (Miyata et al, Infect Immun (2003) 71:2404-13). Its presence on PAPI-2 defines this block as a pathogenicity island.

[0150] PAPI Island ORFs Encode Novel Pathogenicity-Related Functions

[0151] We generated and analyzed 23 mutant strains (FIG. 63), including 10 non-polar deletions and 13 TnphoA transposon insertion mutants, to assess whether the PAPI-1 and PAPI-2 ORFs that encode hypothetical/unknown functions promote P. aeruginosa pathogenesis. None of the mutants was defective for growth in liquid culture or for the extracellular production of pyocyanin and pyoverdine and for protease activity. Since some of the known PAPI-1 genes are involved in adhesion and/or motility, we also evaluated the mutants for colony morphology, in vitro adhesion, and swimming, twitching, and swarming motilities. All the mutants behaved like the wild-type parent, indicating that these activities do not depend on the mutated ORFs, under our experimental conditions.

[0152] Virulence was assessed in plants and animals using the Arabidopsis leaf infiltration and the mouse thermal injury models (Rahme et al., Proc Natl Acad Sci USA (1997) 94:13245-50) as shown in FIG. 63. To assess animal mortality, mice were infected with 5×10⁵ bacterial cells. Eight to sixteen mice were used per experiment. To assess plant pathogenicity, Arabidopsis leaves were inoculated with 3.3×10⁵ bacterial cells and assayed three days post-infection for bacterial CFU/cm². Four different leaves were sampled. All experiments were performed twice. Statistical significance for mortality data and bacterial growth in Arabidopsis leaves were determined by the t test and shown in bold. Differences between groups were considered statistically significant at p<0.05. Statistically different comparisons are shown in bold. FIG. 63 shows that 20 of the 23 mutants exhibited attenuated virulence phenotype in at least one of the hosts, with 12 attenuated in both. Importantly, 15 of these mutants correspond to novel genes and one to a known gene (pvrR) but not previously shown to be involved in virulence. Of the mutated ORFs, RL016, RL022, and RL029 occur within a large region (RL012-30) found in several other phytopathogenic bacteria, and RL036-37 and RL038-39 encode two-component regulatory systems, suggesting that pathogenicity activities regulated by these systems are evolutionarily conserved.

[0153] Presence of PAPI-1 in Other P. aeruginosa Clinical Isolates

[0154] We used 11 hybridization probes spanning PAPI-1 to assess its occurrence in 14 P. aeruginosa pathogenic strains, 12 of which were isolated from CF patients (FIG. 61) (Wolfgang et al., supra, and Liang et al., supra). These probes were nucleic acid fragments of PAPI-1 (SEQ ID NO: 2) and included nucleotides 2323-4185 of SEQ ID NO: 2 (SEQ ID NO: 283), nucleotides 3699-5161 of SEQ ID NO: 2 (SEQ ID NO: 284), nucleotides 11351-12180 of SEQ ID NO: 2 (SEQ ID NO: 285), nucleotides 25562-26456 of SEQ ID NO: 2 (SEQ ID NO: 286), nucleotides 35321-36307 of SEQ ID NO: 2 (SEQ ID NO: 287), nucleotides 40536-41653 of SEQ ID NO: 2 (SEQ ID NO: 288), nucleotides 61179-63605 of SEQ ID NO: 2 (SEQ ID NO: 289), nucleotides 74931-76115 of SEQ ID NO: 2 (SEQ ID NO: 290), nucleotides 84920-86620 of SEQ ID NO: 2 (SEQ ID NO: 291), nucleotides 103068-104554 of SEQ ID NO: 2 (SEQ ID NO: 292), or nucleotides 104797-105543 of SEQ ID NO: 2 (SEQ ID NO: 293).

[0155] While CF1, CF3, CF4, CF5, CF27, CF28, CF30 and CF32 did not hybridize with any of the probes used, PA037, CF2 and CF6 hybridized with all of them, suggesting that these strains carry the entire 108 kb PAPI-1 island. In contrast, other strains hybridized to a subset of probes. CF26 appears to carry the complete island, except for the region found between the DR2 sequences, while CF29 only carries its leftward half. Both PAK and PAO1 contain only a small segment of PAPI-1, with PAK carrying its left end, and PAO1 a 1.7 kb region that harbors the pyocin S5 and immunity genes.

[0156] The fact that several PAPI-1 and PAPI-2 genes have known relatives in the genomes of plant, soil, animal, and human-associated bacterial species is not surprising, as P. aeruginosa inhabits soil and water environments, and is associated with several hosts. It is likely that during its evolution P. aeruginosa has encountered a diverse array of bacterial species that have donated, and continue to donate, foreign DNA fragments. In turn, these fragments have affected the evolution of P. aeruginosa pathogenic variants to colonize even more environments. Presumably, this gene flow is bi-directional, such that P. aeruginosa virulence genes have spread to other bacterial species, to generate novel virulent strains in these species as well.

[0157] PAPI-1 and PAPI-2 mutational analysis demonstrate that both islands carry genes that allow this pathogen to thrive on evolutionary diverse hosts, including plants (Arabidopsis) and mammals (mouse). Indeed, of the 23 ORFs mutated here, 19 encode functions necessary for plant or mammalian virulence, with 12 required for “wild-type” virulence in both hosts. Although the majority of these genes encode products of unknown function, their presence in P. aeruginosa clinical isolates, including those from CF patients, may be important for fitness and survival. The characterization of these novel pathogenicity factors may provide insights into broad host pathogenic and defense mechanisms. Completion of the PA14 genome sequence may also result to the identification of additional PAPI blocks and novel virulence genes.

[0158] The above studies were performed using the following materials and methods.

[0159] Clones Containing Nucleic Acids of the Invention

[0160] Exemplary clones containing nucleic acids of the invention are described in Table 1. For example, ORF7 is in p148. To generate these cosmid clones shown in FIGS. 62A and 62B, Pseudomonas aeruginosa genomic DNA fragments were inserted into the pRR544 vector.

TABLE 1
Clones containing nucleic acids of the invention

| | | |
|---|---|---|
| Cosmid Clones | Size of the insert | Island sequence ref # |

Pathogenicity Island-1, PAPI-1 (Big island)

| | | |
|---|---|---|
| pI48 | 42000 bp | 01-23929 bp |
| pG22 | 40000 bp | 11824-52379 bp |
| pSK91 | 39000 bp | 48048-87433 bp |
| pSK24 | 40000 bp | 79084-108759 bp |

Pathogenicity Island-2, PAPI-2 (Small island)

| | | |
|---|---|---|
| PH44 | 40000 bp | 01-11024 bp |

Deposit

[0162] Pseudomonas aeruginosa strain UBCPP-PA14 has been deposited with the American Type Culture Collection on Mar. 22, 1995, and bears the accession number ATCC No. 55664. Cosmid clones p148, pG22, pSK91, pSK24 and PH44 have been deposited with the American Type Culture Collection, and bear the accession numbers ATCC No. PTA-4768 (deposited Oct. 25, 2002), PTA-4766 (deposited Oct. 25, 2002), PTA-4666 (deposited Sep. 13, 2002), PTA-4767 (deposited Oct. 25, 2002), and PTA-4664 (deposited Sep. 13, 2003), respectively. Applicants acknowledge their responsibility to replace these clones should they lose viability before the end of the term of a patent issued hereon, and their responsibility to notify the American Type Culture Collection of the issuance of such a patent, at which time the deposit will be made available to the public. Prior to that time the deposit will be made available to the Commissioner of Patents under terms of CFR § 1.14 and 35 USC § 112.

[0163] Strains, Plasmids, and Media

[0164] All P. aeruginosa parental strains are human isolates (Rahme et al., Science (1995) 268:1899-902, Wolfgang et al, supra, and Liang et al., supra). The TnphoA mutant 33A9 has been previously described (Rahme et al., Proc Natl Acad Sci USA (1997) 94:13245-50). The PA14 genomic cosmid library, constructed in pJSR (Rahme et al., (1995) Science 268:1899-902), was grown in E. coli VCS257, and subcloned in DH5α.pRK2013 and pEX18Ap (Hoang et al., Gene (1998) 212:77-86) served respectively as the P. aeruginosa conjugation helper plasmid and marker exchange suicide vector. Bacteria were grown in LB plus 100 μg/ml ampicillin (E. coli), 100 μg/ml rifampicin (PA14), and 250 μg/ml carbenicillin (PA14 transconjugants).

[0165] DNA Methods and Library Construction

[0166] Probes were labeled with [³²P]-dCTP (NEN) using Rediprime II (Amersham Pharmacia Biosciences). Genomic, cosmid and plasmid DNA extractions followed standard procedures (Ausubel et al., (1998) John Wiley and Sons, New York). To construct the PA14 cosmid library, a 30-50 kb partial Sau3AI digest of total PA14 DNA was size-fractionated in a 10-40% sucrose gradient, cloned into the BamHI site of pJSR, and packaged using Gigapack III XL (Stratagene).

[0167] PA14 Mutants

[0168] Non-polar deletions in eleven PAPI-1 ORFs and one PAPI-2 ORF were generated by PCR: 1.0 to 1.6 kb 5′ and 3′ segments were amplified from target PA14 genomic or cosmid DNA, and each amplicon, which included the first or last 10-20 amino acids of the target ORF, plus an engineered restriction site, were ligated into pEX18Ap, to produce replacement plasmids. Non-polar mutants were generated in PA14 via homologous recombination by sucrose resistance selection, and confirmed by hybridization.

[0169] Twelve TnphoA transposon insertion mutants of PA14 were obtained from a partial library currently being developed, which, when completed, will include transposon-insertion mutants of all non-essential PA14 ORFs. Access to mutants and information about this library is currently available via a web interface. (MGH-Parabiosys: NHLBI Program for Genomic applications, Massachusetts General Hospital and Harvard Medical School, Boston, Mass.; http://pga.mgh.harvard.edu/cgi-bin/pa14/mutants/retrieve.cgi).

[0170] Plant and Mouse Pathogenicity Studies

[0171] Mouse mortality and Arabidopsis thaliana (ecotype Col-1) plant infection studies were as described (Rahme et al., Science (1995) 268:1899-902).

[0172] DNA Sequencing and Annotation

[0173] The nucleotide sequences of the PA14 pI48, pG22, pSK91, pSK24, pF62 and pH44 cosmids were determined by shotgun sequencing. Cosmid fragments subcloned into pBluescript SK (−) and pDN19 were sequenced by primer walking to cover gaps. Individual reads were aligned and assembled using DNAstar and CAP (http://pbil.univ-lyon1.fr/cap3.html). The sequence was compared to the PAO1 annotated genome (http://www.pseudomonas.com) (Stover et al., supra.). tRNA genes were identified using tRNA-sacn-SE (http://www.genetics.wustl.edu/eddy/tRNAscan-SE). ORFs were predicted using GeneMark.hmm (http://opal.biology.gatech.edu/GeneMark/gmhmm2_prok.cgi; (Lukashin et al., Nucleic Acids Res (1998) 26:1107-1115) and ORF finder http://www.ncbi.nlm.nih.gov/gorf/gorf.html). Each predicted ORF of greater than 200 bp was analyzed for homologies and conserved motifs using BlastN, BlastP and BlastX. A full array of parameters was used. PSORT (http://psort.nibb.acjp/form.html) and TMpred (http://www.ch.embnet.org/software/TMPRED_form.html) were respectively used to predict cellular localization and transmembrane regions.

[0174] Characterization of ORF7

[0175] The amino acid sequence (SEQ ID NO: 278) and nucleotide sequence (SEQ ID NO: 119) of ORF7 are shown in FIGS. 54 and 55, respectively. The sequence of the predicted translation product of ORF7 (found in PAPI-1) revealed the presence of a Arg-Gly-Asp (RGD) tripeptide sequence, which is a characteristic motif found in eukaryotic proteins that bind to host cell surface integrins and are involved in bacterial adherence. Site-directed mutagenesis was performed to convert the Arg-Gly-Asp (RGD) tripeptide into Trp-Ile-His (W1H). After introducing the mutation into the PA14 chromosome via homologous recombination, a burned mouse model and a neonatal lung infection model were used to test the function of the RGD motif. The ORF7 RGD mutants had reduced virulence, thus indicating that this ORF is involved in virulence.

[0176] We have further found an alternative translational start codon for ORF7 (TTG) is predicted by the Glimmer software (http://glimmer.sourceforge.net/), adding 14 aminoacids to the above sequence. The updated sequence (SEQ ID NO: 280) is shown in FIG. 67, with the 14 first aminoacids highlighted. Also shown is the corresponding nucleotide sequence (SEQ ID NO: 281). In addition, using the software “SMART” (http://smart.embl-heidelberg.de/) a signal sequence of 48 aminoacids (underlined) is predicted in the N-terminal portion of the protein, indicating that the ORF7 protein may be translocated through the inner membrane.

[0177] The translational start site identified was confirmed by constructing a lacZORF7 translational fusion. The first eleven ORF7 codons were fused to the reporter gene lacZ and cloned into a plasmid vector. The ORF7 protein is translated in both Escherichia coli and Pseudomonas aeruginosa. The fact that the ORF7 gene encodes for a protein was further confirmed by introducing a nonsense mutation in its 42^{nd} codon of the ORF7 and a chromosomal mutation was generated without interfering with the overlapping c/pB gene. This mutant strain, denominated ORF7stop, exhibited attenuated virulence in the plant Arabidopsis thaliana. Virulence may further be tested in the mouse burn model. Thus, our results demonstrate that the ORF7 DNA is transcribed and translated in vivo.

[0178] ORF7 Promoter Region Analysis

[0179] The mapping of the transcriptional start sites of ORF7 was carried out by primer extension experiments. Synthetic oligonucleotides (18-mer) complementary to the mRNA was 5′ end labeled with [γ-³²P]ATP and polynucleotide kinase and hybridized to 50 μg of total RNA isolated with RNeasy miniprep kit (Qiagen) from PA14 mid-exponential cultures grown at 37° C. Annealing was carried out at 50° C. overnight in 8 mM piperazine-N,N′-bis (2-ethanesulfonic acid) buffer pH 6.4 containing 80 M NaCl, 0.2 mM EDTA and 80% formamide. The nucleic acids were ethanol precipitated and resuspended in MMLV-RT (Moloney murine leukemia virus reverse transcriptase) reaction buffer (Amersham) containing 1 mM each dNTP and 40 u of RNAsin (Promega). The annealed primer was extended at 37° C. for 90 min using 300 U of MMLV-RT (Amersham). RNA was digested for 30 min at 37° C. by the addition of 23 μg/ml RNase A, and the extended products were analyzed by electrophoresis on denaturing sequencing gels followed by autoradiography.

[0180] These experiments showed two putative transcription start sites for ORF7, originating from the region inside the large pathogenicity island, as shown in FIG. 68.

[0181] Presence of the ORF7 Regulatory Region in other Pseudomonas aeruginosa Strains

[0182] In order to determine whether ORF7 is also present in the genome of other P. aeruginosa strains besides PA14, we carried out PCR reactions using as one primer the sequence found upstream of the promoter region [orf7 (1), 5′-CCC CAA GCT TGC ACA CCC TGG CCA CCG ACT T-3′]. The second primer is designed based on sequences found within the ORF7 coding region [orf7(2), 5′-TGA GAC GCG GAT CCA GCA ACA]. Total DNA isolated from the P. aeruginosa strains PA14, PAO1, CF2, CF6, CF26, CF 29, and PAK was used as a template. As illustrated in the FIG. 69, a band of the expected 1.1 kb size was obtained from the PA14, PA037, CF2, CF6 and CF26 total DNA. For verification, all PCR products were sequenced (except PA037) and the sequences were aligned by Clustal W at http://www.ebi.ac.uk/clustalw/alignment software. As shown in FIG. 70, all conserved nucleotides are indicated by *. The PA14 transcription start sites that were determined experimentally are boxed.

[0183] Protein Interactions with ORF7

[0184] To study the role of ORF7 in more detail, a standard two-hybrid approach was used. The yeast two-hybrid system is a simple screening method for protein-protein interactions using the transcriptional activation of secondary reporters as a readout. Briefly, the first protein is expressed as a translational fusion to a DNA-binding domain (DBD) of known binding site specifity, and the interacting protein is expressed as a translational fusion to a transcriptional activation domain (AD). One or more reporter genes are transcriptionally dependent on activation through the cognate binding site or the DBD. Both fusions are introduced into yeast cells, and the interaction of both protein fusions (the DBD fusion“bait” and the AD fusion “prey,” respectively) positions the activation domain in proximity to the reporter gene and activates transcription of the reporter gene. In order to identify potential interacting partners, ORF7 was used as a bait to screen a human lung library.

[0185] Cloning of ORF7 from Genomic DNA

[0186] The ORF7 gene from Pseudomonas aeruginosa PA14 strain was PCR amplified from genomic DNA using Pwo DNA-polymerase (Roche) and the following oligonucleotides; #63 forward (5′-GCGGATCCCCATGATTAACAGTCATTTG-3′) and #64 reverse (5′-CCGTGATCACTATAGAAGGAAGGACGAC-3′). The PCR reaction was set up according to the manufactures instructions as follows (Table 2).

TABLE 2

| | |
|---|---|
| 10xPwo-Puffer with MgSO₄ | 5.00 μl |
| 10 mM dNTPs | 1.00 μl |
| oligo forward 100 pmol/μl | 0.25 μl |
| oligo reverse 100 pmol/μl | 0.25 μl |
| genomic DNA | 2.00 μl |
| Pwo DNA-polymerase | 0.50 μl |
| 5 U/μl | |
| DMSO | 5.00 μl |
| Water | 41.0 μl |
| Total | 50.0 μl |

[0187] The following PCR program in a Perkin Elmer ThermoCycler 9600 was used: 30 seconds at 94° C.; 30 cycles in which each cycle included 30 seconds at 94° C., 30 seconds at 50° C., 72° C., and 7 minutes at 72° C. The product of the PCR reaction was separated by agarose gel electrophoresis and extracted using a gel extraction kit (QIAGEN).

[0188] Construction of pGBKT7-ORF7

[0189] The gel extracted PCR product of ORF7 was digested with the restriction endonucleases BamHI (NEB) and BclII (NEB). This fragment was subsequently ligated into the BamHI site of vector pGBKT7 (Clontech), which was treated with calf intestinale phosphatase (CIP) to reduce background religation of the vector itself. The ligation reaction mixture was transformed into TOP10 competent cells, and DNA was prepared using the DNA mini prep protocol (QIAGEN). The correct clone was first analyzed by digestion with restriction endonucleases and then verified by sequencing.

[0190] Two-Hybrid Screen with a Human Lung Library

[0191] A human lung cDNA library (Clontech, #HL4044AH) was used in the two-hybrid screen. This library was made from RNA of two normal whole lungs pooled from two females, and the cDNA was cloned via an adaptor in XhoI/EcoRI of pACT2. The average cDNA size is 2.0 kb, and the size range was from 0.4-4.0 kb.

[0192] The human lung library was amplified to obtain enough DNA to perform the two-hybrid screen. First, the titer of the library was estimated by striking different aliquots of the library containing bacteria in different dilutions on LB plates with ampicilin (final concentration 100 μg/ml) and incubating them for 24-36 hours at 30° C. The number of colonies indicated a titer of ˜1×10⁹ colonies per ml. Then, the number of plates needed for amplification was calculated as follows: 3.3×10⁶ independent clones×3=9.9×10⁶ clones to be screened. Since only 85% of the colonies contained an insert, 111.6×10⁶ clones have to be screened. By spreading out 20,000 colonies per 15 mm plate, the library was amplified using 580 plates (11.6×10^{6/20,000=580}). The bacteria were spread onto 580 LB/ampicilin plates and incubated overnight at 30° C. The colonies from each plate were collected by adding 5 ml LB medium and scraping the cells using a cell scraper. The collected cells were incubated for 3.5 hours at 30° C. The cells were harvested and frozen in aliquots. Approximately, 40 ml bacterial pellets were resuspended in 800 ml P1 buffer, and DNA was isolated using the GigaprepKit (QIAGEN) according to the manufacturer's instructions.

[0193] An aliquot of the amplified library was checked by PCR for the presence of three different genes (i.e., human β-actin, human transferrin receptor, and human glyceraldehyde 3-phosphate dehydrogenase (G3PDH)) present in the original library. All three genes were amplified out of the re-amplified library, demonstrating that the amplification did not notably affect the relative distribution of the genes. For the amplification of human β-actin, 5′primer #20 β-actin (5′-ATCTGGCACCACACCT TCTACAATGAGCTGCG-3′ and 3′primer # 19 β-actin (5′-CGTCATACTCCTGCTTG CTGATCCACATCTGC-3′ were used. For human transferrin receptor, 5′primer (5′-CCACCATCTCGGTCATCAGGATTGCCT-3′ and 3′primer (5′-TTCTCATGGAAGCTATGGGTATCACAT-3′ were used. For human glyceraldehyde 3-phosphate dehydrogenase (G3PDH), 5′primer (5′-TGAAGGTCGGAGTCAAC GGATTTGGT-3′ and 3′primer (5′-CATGTGGGCCATGAGGTCCACCAC-3′ were used. The library transformation and the two-hybrid analysis were performed according the manual MATCHMAKER Two-Hybrid System 3 (#K1612-1, Clontech).

[0194] Isolation of Plasmid DNA from Yeast

[0195] This procedure for plasmid isolation was adapted from the QlAprep Spin Miniprep Kit protocol by QIAGEN. A single colony was inoculated into 2-5 ml of the appropriate selective media, and the culture was grown for 16-24 hours at 30° C. The cells were harvested by centrifugation for five minutes at 5000×g and resuspended in 250 μl Buffer P1 containing 0.1 mg/ml RNase A. The cell suspension was transferred to a 1.5-ml microfuge tube. Acid-washed glass beads (50-100 μl, Sigma G-8772) were added and vortexed for five minutes. The beads were allowed to settle. The supernatant was transferred to a fresh 1.5-ml microfuge tube. Lysis buffer P2 (250 μl) was transferred to the tube and inverted gently 4-6 times to mix. The mixture was incubated at room temperature for five minutes. Neutralization buffer N3 (350 μl) was added to the tube and inverted immediately but gently 4-6 times. The lysate was centrifuged for 10 minutes at maximum speed in a tabletop microcentrifuge (13,000 rpm or 210,000×g). The cleared lysate was transferred from a QIAprep spin column by decanting or pipetting, and centrifuged for 30-60 seconds (13,000 rpm or over 10,000×g). The flow-through was discarded. The QlAprep spin column was washed by adding 0.75 ml of Buffer PE and centrifuging 30-60 seconds (13,000 rpm or over 10,000× g). The flow-through was discarded, and the sample was centrifuged for an additional minute to remove residual wash buffer (13,000 rpm or over 10,000×g). The QlAprep column was placed into a clean 1.5-ml microfuge tube. To elute DNA, 25 μl of Buffer EB (10 mM Tris CI, pH 8.5) or H₂O was added to the center of each QIAprep spin column, incubated for one minute, and centrifuged for one minute. Typically, 2-5 μl of the eluate was transformed in E. coli to obtain at least 5-20 colonies. These colonies were then inoculated to isolate plasmid DNA.

[0196] Subcloning of Human Lung Genes into pGADT7

[0197] The fragments containing the reading frame of the human lung genes were subcloned into the pGADT7 vector (Clontech) using the following strategy. The insert was PCR amplified by using the forward primer # 13 (5′-CTATTCGATGATG AAGATACCCCACCAAACCC-3′) and the reverse primer #89 (5′-ACTTGCGGGG TTTTTCAGTATCTACGAT-3′). The amplified DNA was then digested with the restriction endonuclease SfiI and ligated in frame with SfiI/SmaI digested pGADT7. The reverse primer was phosphorylated allowing the treatment of pGADT7 with CIP. Only the plasmids pS136 and pS137 were cloned differently since the inserts contained an internal SfiI-site. The insert was PCR amplified using the forward primer #88 (5′-GGGATCCCGAATTCGCGGCCGCGTCGAC-3′) and the reverse primer #89. The amplified DNA was then ligated in frame in the SmaI site of pGADT7. All plasmids were verified by sequencing (Table 3).

TABLE 3

| # | plasmid name |
|---|---|
| pS131 | pACT2-human lung gene 1C3 #2 |
| pS132 | pACT2-human lung gene 1F8 #8 |
| pS133 | pACT2-human lung gene 4C6 #47 |
| pS134 | pACT2-human lung gene 4E7 #56 |
| pS135 | pACT2-human lung gene 4F8 #59 |
| pS136 | pACT2-human lung gene 4F10#60 |
| pS137 | pACT2 human lung gene 4H8 #63 |
| pS138 | pACT2-human lung gene 5A1 #65 |
| pS139 | pACT2-human lung gene 5E7 #80 |
| pS140 | pACT2-human lung gene 5G1 #86 |
| pS420 | pGADT7-human lung gene 1C3 #2 |
| pS421 | pGADT7-human lung gene 1F8 #8 |
| pS422 | pGADT7-human lung gene 4C6 #47 |
| pS423 | pGADT7-human lung gene 4E7 #56 |
| pS424 | pGADT7-human lung gene 4F8 #59 |
| pS425 | pGADT7-human lung gene 4F10#60 |
| pS426 | pGADT7-human lung gene 4H8 #63 |
| pS427 | pGADT7-human lung gene 5A1 #65 |
| pS428 | pGADT7-human lung gene 5E7 #80 |
| pS429 | pGADT7-human lung gene 5G1 #86 |

[0198] Analysis of Identified Human Lung Genes

[0199] To identify the clones isolated from the human lung library, the respective plasmid DNA was isolated, and the DNA sequence was determined by sequencing. These sequences were used to search for homologous genes using the Bioscout program (LION, Heidelberg). The nucleotide (SEQ ID NO: 109-118) and amino acid sequences (SEQ ID NO: 269-277) of the identified human lung genes are shown in FIGS. 44-52.

[0200] Western Blot Analysis of Yeast Cells

[0201] Yeast cells were incubated in selective media to ensure the presence of plasmids and grown to an optical density of OD₆₀₀=1.0 (2×10⁷ Zellen/ml). Cells (4 OD units) were centrifuged for five minutes at 2,500 rpm (1,430×g) at 4° C. The supernatant was carefully discarded and any residual media was completely removed. The pellet was resuspended in 0.5 ml 0.25M NaOH/1% 2-mercaptoethanol and incubated on ice for 10 minutes. Ice-cold 50% trichloracetic acid was added and vortexed. The reaction was further incubated for 10 minutes on ice and subsequently centrifuged for 10 minutes at 14,000 rpm (15,800×g) and 4° C. The pellet was washed with 1 ml ice-cold acetone and shortly dried. SDS sample buffer (95 μl) and 5 μl 1 M tris, pH 8.0 was added. Before loading the samples onto an SDS gel, the proteins were denatured by boiling for five minutes at 95° C.

[0202] For the detection of the fusion proteins or for the co-immunoprecipitation experiments (see next section) the following antibodies were used: anti-c-Myc (Clontech, mouse monoclonal, final concentration 2.0 μg/ml), anti-HA (Roche, 12CA5, mouse monoclonal, final concentration 0.5 μg/ml), anti-Gal4 DB (Clontech, mouse monoclonal, final concentration 0.5 μg/ml), and anti-Gal4 AD (Clontech, mouse monoclonal, final concentration 0.4 μg/ml), and anti-Maus Ig antibody developed in goat (Amersham). The blots were developed using the ECL^{PLUS} system (Amersham) and visualized with the Image station 440CF (Kodak).

[0203] Develop Antibodies Against ORF7

[0204] Peptide antibodies were generated by Eurogentec against the following peptide sequences in a rabbit: EPO11500 Peptid AS 73-86 (H₂N-CPDAHEKAPPKRGFP-CONH₂) and EPO11501 Peptid AS 43-58 (H₂N-CQPSDPKSFSSFSTSD-CONH₂). These antibodies were able to detect ORF7 in yeast cells.

[0205] Coimmunoprecipitation Experiments to Confirm the Interaction in an Independent Assay

[0206] The protein interaction detected through an in vivo two-hybrid screen was confirmed by an in vitro biochemical assay. The DNA-binding domain (DBD) containing vector pGBKT7 has a T7 promoter and a c-myc epitope tag allowing the direct application of this vector in an in vitro transcription/translation reaction. The human lung genes were subcloned into the pGADT7 vector to in vitro transcribe/translate a fusion with the HA-epitope tag. Because the T7 promoters and epitope tags are located downstream of the GAL4 coding sequences, the epitope-tagged bait and library proteins were transcribed and translated without the GAL4 domains.

[0207] Proteins used for the co-immunopreciptation experiments were either synthesized in the coupled transcription-translation kit (TnT, Promega) or generated by first synthesizing the corresponding RNA and then adding this RNA to the translation mixture of the reticuloyte lysate (Promega). The translations were performed in the presence of [³⁵S]-methione to label the proteins. All reactions were carried out according to the manufacturer's instructions.

[0208] For the immunoprecipitation, the translation mixtures were incubated for 30 minutes at 30° C. with 1 μg of the antibody. After addition of buffer (PBS-KMT, 0.5% tween-20, 0.1% BSA) 5 μl of magnet proteinA beads (pretreated three times with buffer in order to equilibrate the beads) were added and incubated for one hour at 4° C. Magnetic proteinA beads were collected at the bottom of the tube using a magnetic device. Beads were washed three times with buffer, resuspended in buffer, transferred into a new reaction tube, and washed again. Finally, the supernatant was almost completely removed, and the beads were boiled in SDS sample buffer before performing SDS-PAGE. Samples were separated using a 4-20% Tris-glycine gel (Novex), and a phoshorimaging screen was used to detect the protein.

[0209] Analysis of Presence of ORF7 in Different Genetic Backgrounds of Pseudomonas aeruginosa

[0210] Genomic DNA from the different Pseudomonas strains PAO1, PA14, and PA37 was prepared using the DNeasy Tissue Kit (QIAGEN) according the manufacture's instructions. The presence of ORF7 was confirmed by PCR amplification of genomic DNA using Pwo DNA-polymerase (Roche) and the following oligonucleotides:

#63 forward
(5′-GCGGATCCCCATGATTAACAGTCATTTG-3)
and
#64 reverse
(5′-CCGTGATCACTATAGAAGGAAGGACGAC-3).

[0211] The PCR protocol is listed in Table 4.

TABLE 4

| | |
|---|---|
| 10xPwo-Puffer with MgSO₄ | 5.00 μl |
| 25 mM MgSO₄ | 4.00 μl |
| 10 mM dNTPs | 1.00 μl |
| oligo #63 forward | 0.25 μl |
| 100 pmol/μl | |
| oligo #64 | 0.25 μl |
| reverse100 pmol/μl | |
| genomic DNA | 1 μg |
| Pwo DNA-polymerase | 0.50 μl |
| 5 U/μl | |
| DMSO | 5.00 μl |
| water | |
| total | 50.0 μl |

[0212] The following PCR program in Perkin Elmer ThermoCycler 9600 was used: 30 seconds at 94° C.; 30 cycles in which each cycle included 30 seconds at 94° C., 30 seconds at 50° C., two minutes thirty seconds at 72° C.; and 7 minutes at 72° C. An aliquot of the PCR reaction was separated by agarose gel electrophoresis and analyzed. The DNA was stained with ethidium bromide.

TABLE 5
Clones identified in the two-hybrid screen of ORF7 with a
human lung library (two independent screens, FIGS. 35-52)

| clone | clone | identified as | Homologous sequences |
|---|---|---|---|
| 2 | 1C3 | homologous to | SEQ ID NOs: 230-232 |
| | | Homo sapiens mRNA; EST | |
| | | DKFZp566K094_r1 | |
| | | (from clone DKFZp566) | |
| 8 | 1F8 | some homology to | SEQ ID NOs: 233-235 |
| | | EST01285 Subtracted | |
| | | Hippocampus, | |
| | | Stratagene (cat. #936205) | |
| 47 | 4C6 | direct assignment of | SEQ ID NOs: 236-238 |
| | | functionality | |
| | | by homology to | |
| | | FIBRILLIN 1 PRECURSOR | |
| 56 | 4E7 | clear assignment of | SEQ ID NOs: 239-241 |
| | | functionality by | SEQ ID NOs: 242-244 |
| | | homology to | |
| | | tremb1\|AF088916\|AF088916_1 | |
| | | emilin precursor; 50% identity in | |
| | | C1q-like domain | |
| 59 | 4F8 | potential assignment of | SEQ ID NOs: 245-247 |
| | | functionality by homology to | SEQ ID NOs: 248-250 |
| | | pironly\|A35763\|A35763 | |
| | | collagen alpha 2 | |
| | | chain - sea urchin | |
| | | (Paracentrotus lividus) | |
| | | (fragment) | |
| 60/63 | 4F10/ | Direct assignment of | SEQ ID NOs: 251-253 |
| | 4H8 | functionality by | SEQ ID NOs: 254-256 |
| | | homology to swiss\|P20062\| | |
| | | TCO2_HUMAN | SEQ ID NOs: 257-259 |
| | | TRANSCOBALAMIN II | |
| | | PRECURSOR | |
| 65 | 5A1 | Direct assignment of | SEQ ID NOs: 260-262 |
| | | functionality | |
| | | by homology to | |
| | | swissnew\|P23142\| | |
| | | FBL1_HUMAN | |
| | | FIBULIN-1 PRECURSOR. | |
| 80 | 5E7 | Clear assignment of | SEQ ID NOs: 263-265 |
| | | functionality | |
| | | by homology to | |
| | | tremb1\|AF045447\| | |
| | | AF045447_1 | |
| | | deleted in pancreatic | |
| | | carcinoma | |
| | | (DPC4) | |
| 86 | 5G1 | Clear assignment of | SEQ ID NOs: 266-268 |
| | | functionality | |
| | | by homology to | |
| | | tremb1\|D32210\|D32210_1 | |
| | | cell surface protein (Notch2) | |

Isolation of Additional Virulence Genes

[0214] Based on the nucleotide and amino acid sequences described herein, the isolation of additional coding sequences of virulence factors is made possible using standard strategies and techniques that are well known in the art. Any pathogenic cell can serve as the nucleic acid source for the molecular cloning of such a virulence gene, and these sequences are identified as ones encoding a protein exhibiting pathogenicity-associated structures, properties, or activities.

[0215] In one particular example of such an isolation technique, any one of the nucleotide sequences described herein may be used, together with conventional screening methods of nucleic acid hybridization screening. Such hybridization techniques and screening procedures are well known to those skilled in the art and are described, for example, in Benton and Davis (Science 196:180, 1977); Grunstein and Hogness (Proc. Natl. Acad. Sci., USA 72:3961, 1975); Ausubel et al. (Current Protocols in Molecular Biology, Wiley Interscience, New York, 1997); Berger and Kimmel (supra); and Sambrook et al., Molecular Cloning: A Laboratory Manual, Cold Spring Harbor Laboratory Press, New York. In one particular example, all or part of any one of the polynucleotide sequences described herein may be used as a probe to screen a recombinant bacterial DNA library for genes having sequence identity to any one of the nucleic acids of the invention (SEQ ID NOs: 1-108, SEQ ID NOs: 119-120, and SEQ ID NOs: 281-282). Hybridizing sequences are detected by plaque or colony hybridization according to standard methods.

[0216] Alternatively, using all or a portion of the amino acid sequence of any one of the polypeptides described herein, one may readily design specific oligonucleotide probes, including degenerate oligonucleotide probes (i.e., a mixture of all possible coding sequences for a given amino acid sequence) for the amplification of additional nucleic acids encoding proteins of the invention. These oligonucleotides may be based upon the sequence of either DNA strand and any appropriate portion of a polynucleotide sequence of the invention (SEQ ID NOs: 1-108, SEQ ID NOs: 119-120, and SEQ ID NOs: 281-282). General methods for designing and preparing such probes are provided, for example, in Ausubel et al. (supra), and Berger and Kimmel, Guide to Molecular Cloning Techniques, 1987, Academic Press, New York. These oligonucleotides are useful for gene isolation, either through their use as probes capable of hybridizing to complementary sequences or as primers for various amplification techniques, for example, polymerase chain reaction (PCR) cloning strategies. If desired, a combination of different, detectably labeled oligonucleotide probes may be used for the screening of a recombinant DNA library. Such libraries are prepared according to methods well known in the art, for example, as described in Ausubel et al. (supra), or they may be obtained from commercial sources.

[0217] As discussed above, sequence-specific oligonucleotides may also be used as primers in amplification cloning strategies, for example, using PCR. PCR methods are well known in the art and are described, for example, in PCR Technology, Erlich, ed., Stockton Press, London, 1989; PCR Protocols. A Guide to Methods and Applications, Innis et al., eds., Academic Press, Inc., New York, 1990; and Ausubel et al. (supra). Primers are optionally designed to allow cloning of the amplified product into a suitable vector, for example, by including appropriate restriction sites at the 5′ and 3′ ends of the amplified fragment (as described herein). If desired, nucleotide sequences may be isolated using the PCR “RACE” technique, or Rapid Amplification of cDNA Ends (see, e.g., Innis et al. (supra)). By this method, oligonucleotide primers based on a desired sequence are oriented in the 3′ and 5′ directions and are used to generate overlapping PCR fragments. These overlapping 3′- and 5′-end RACE products are combined to produce an intact full-length cDNA. This method is described in Innis et al. (supra); and Frohman et al., Proc. Natl. Acad. Sci. USA (1998) 85:8998).

[0218] Partial virulence sequences, e.g., sequence tags, are also useful as hybridization probes for identifying full-length sequences, as well as for screening databases for identifying previously unidentified related virulence genes.

[0219] Confirmation of a sequence's relatedness to a pathogenicity polypeptide may be accomplished by a variety of conventional methods including, but not limited to, functional complementation assays and sequence comparison of the gene and its expressed product. In addition, the activity of the gene product may be evaluated according to any of the techniques described herein, for example, the functional or immunological properties of its encoded product.

[0220] Once an appropriate sequence is identified, it is cloned according to standard methods and may be used, for example, for screening compounds that reduce the virulence of a pathogen.

[0221] Polypeptide Expression

[0222] In general, polypeptides of the invention may be produced by transformation of a suitable host cell with all or part of a polypeptide-encoding nucleic acid molecule or fragment thereof in a suitable expression vehicle.

[0223] Those skilled in the field of molecular biology will understand that any of a wide variety of expression systems may be used to provide the recombinant protein. The precise host cell used is not critical to the invention. A polypeptide of the invention may be produced in a prokaryotic host (e.g., E. coli) or in a eukaryotic host (e.g., Saccharomyces cerevisiae, insect cells, e.g., Sf21 cells, or mammalian cells, e.g., NIH 3T3, HeLa, or preferably COS cells). Such cells are available from a wide range of sources (e.g., the American Type Culture Collection, Rockland, Md.; also, see, e.g., Ausubel et al., supra). The method of transformation or transfection and the choice of expression vehicle will depend on the host system selected. Transformation and transfection methods are described, e.g., in Ausubel et al. (supra); expression vehicles may be chosen from those provided, e.g., in Cloning Vectors: A Laboratory Manual (P. H. Pouwels et al., 1985, Supp. 1987).

[0224] One particular bacterial expression system for polypeptide production is the E. coli pET expression system (Novagen, Inc., Madison, Wis.). According to this expression system, DNA encoding a polypeptide is inserted into a pET vector in an orientation designed to allow expression. Since the gene encoding such a polypeptide is under the control of the T7 regulatory signals, expression of the polypeptide is achieved by inducing the expression of T7 RNA polymerase in the host cell. This is typically achieved using host strains, which express T7 RNA polymerase in response to IPTG induction. Once produced, recombinant polypeptide is then isolated according to standard methods known in the art, for example, those described herein.

[0225] Another bacterial expression system for polypeptide production is the pGEX expression system (Pharmacia). This system employs a GST gene fusion system which is designed for high-level expression of genes or gene fragments as fusion proteins with rapid purification and recovery of functional gene products. The protein of interest is fused to the carboxyl terminus of the glutathione S-transferase protein from Schistosoma japonicum and is readily purified from bacterial lysates by affinity chromatography using Glutathione Sepharose 4B. Fusion proteins can be recovered under mild conditions by elution with glutathione. Cleavage of the glutathione S-transferase domain from the fusion protein is facilitated by the presence of recognition sites for site-specific proteases upstream of this domain. For example, proteins expressed in pGEX-2T plasmids may be cleaved with thrombin; those expressed in pGEX-3X may be cleaved with factor Xa.

[0226] Once the recombinant polypeptide of the invention is expressed, it is isolated, e.g., using affinity chromatography. In one example, an antibody (e.g., produced as described herein) raised against a polypeptide of the invention may be attached to a column and used to isolate the recombinant polypeptide. Lysis and fractionation of polypeptide-harboring cells prior to affinity chromatography may be performed by standard methods (see, e.g., Ausubel et al., supra).

[0227] Once isolated, the recombinant protein can, if desired, be further purified, e.g., by high performance liquid chromatography (see, e.g., Fisher, Laboratory Techniques In Biochemistry And Molecular Biology, eds., Work and Burdon, Elsevier, 1980).

[0228] Polypeptides of the invention, particularly short peptide fragments, can also be produced by chemical synthesis (e.g., by the methods described in Solid Phase Peptide Synthesis, 2nd ed., 1984 The Pierce Chemical Co., Rockford, Ill.).

[0229] These general techniques of polypeptide expression and purification can also be used to produce and isolate useful peptide fragments or analogs (described herein).

[0230] Antibodies

[0231] To generate antibodies, a coding sequence for a polypeptide of the invention may be expressed as a C-terminal fusion with glutathione S-transferase (GST) (Smith et al., Gene 67:31-40, 1988). The fusion protein is purified on glutathione-Sepharose beads, eluted with glutathione, cleaved with thrombin (at the engineered cleavage site), and purified to the degree necessary for immunization of rabbits. Primary immunizations are carried out with Freund's complete adjuvant and subsequent immunizations with Freund's incomplete adjuvant. Antibody titres are monitored by Western blot and immunoprecipitation analyses using the thrombin-cleaved protein fragment of the GST fusion protein. Immune sera are affinity purified using CNBr-Sepharose-coupled protein. Antiserum specificity is determined using a panel of unrelated GST proteins.

[0232] As an alternate or adjunct immunogen to GST fusion proteins, peptides corresponding to relatively unique immunogenic regions of a polypeptide of the invention may be generated and coupled to keyhole limpet hemocyanin (KLH) through an introduced C-terminal lysine. Antiserum to each of these peptides is similarly affinity purified on peptides conjugated to BSA, and specificity tested in ELISA and Western blots using peptide conjugates, and by Western blot and immunoprecipitation using the polypeptide expressed as a GST fusion protein.

[0233] Alternatively, monoclonal antibodies which specifically bind any one of the polypeptides of the invention are prepared according to standard hybridoma technology (see, e.g., Kohler et al., Nature 256:495, 1975; Kohler et al., Eur. J. Immunol. 6:511, 1976; Kohler et al., Eur. J. Immunol. 6:292, 1976; Hammerling et al., In Monoclonal Antibodies and T Cell Hybridomas, Elsevier, N.Y., 1981; Ausubel et al., supra). Once produced, monoclonal antibodies are also tested for specific recognition by Western blot or immunoprecipitation analysis (by the methods described in Ausubel et al., supra). Antibodies which specifically recognize the polypeptide of the invention are considered to be useful in the invention; such antibodies may be used, e.g., in an immunoassay. Alternatively monoclonal antibodies may be prepared using the polypeptide of the invention described above and a phage display library (Vaughan et al., Nature Biotech 14:309-314, 1996).

[0234] Preferably, antibodies of the invention are produced using fragments of the polypeptide of the invention, which lie outside generally conserved regions and appear likely to be antigenic, by criteria such as high frequency of charged residues. In one specific example, such fragments are generated by standard techniques of PCR and cloned into the pGEX expression vector (Ausubel et al., supra). Fusion proteins are expressed in E. coli and purified using a glutathione agarose affinity matrix as described in Ausubel et al. (supra). To attempt to minimize the potential problems of low affinity or specificity of antisera, two or three such fusions are generated for each protein, and each fusion is injected into at least two rabbits. Antisera are raised by injections in a series, preferably including at least three booster injections.

[0235] Antibodies against any of the polypeptides described herein may be employed to treat bacterial infections.

[0236] Screening Assays

[0237] As discussed above, we have identified a number of P. aeruginosa virulence factors that are involved in pathogenicity and that may therefore be used to screen for compounds that reduce the virulence of that organism, as well as other microbial pathogens. For example, the invention provides methods of screening compounds to identify those which enhance (agonist) or block (antagonist) the action of a polypeptide or the gene expression of a nucleic acid sequence of the invention. The method of screening may involve high-throughput techniques.

[0238] Any number of methods are available for carrying out such screening assays. According to one approach, candidate compounds are added at varying concentrations to the culture medium of pathogenic cells expressing one of the nucleic acid sequences of the invention. Gene expression is then measured, for example, by standard Northern blot analysis (Ausubel et al., supra), using any appropriate fragment prepared from the nucleic acid molecule as a hybridization probe. The level of gene expression in the presence of the candidate compound is compared to the level measured in a control culture medium lacking the candidate molecule. If desired, the effect of candidate compounds may, in the alternative, be measured at the level of polypeptide production using the same general approach and standard immunological techniques, such as Western blotting or immunoprecipitation with an antibody specific for a pathogenicity factor. For example, immunoassays may be used to detect or monitor the expression of at least one of the polypeptides of the invention in a pathogenic organism. Polyclonal or monoclonal antibodies (produced as described above) which are capable of binding to such a polypeptide may be used in any standard immunoassay format (e.g., ELISA, Western blot, or RIA assay) to measure the level of the pathogenicity polypeptide.

[0239] As a specific example, pathogenic cells (e.g., Pseudomonas aeruginosa) that express a nucleic acid encoding a polypeptide substantially identical to the amino acid sequence of ORF7 (SEQ ID NO: 280) are cultured in the presence of a candidate compound (e.g., a peptide, polypeptide, synthetic organic molecule, naturally occurring organic molecule, nucleic acid molecule, or component thereof). In this regard, cells may endogenously express the polypeptide encoded by ORF7. Alternatively, cells may be genetically engineered by any standard technique known in the art (e.g., transfection and viral infection) to overexpress the polypeptide encoded by ORF7. The expression of the virulence factor encoded by the ORF7 nucleic acid is measured in these cells by means of Western blot analysis and subsequently compared to the level of expression of the same protein in control cells that have not been contacted by the candidate compound. A compound which promotes a decrease in the expression of the pathogenicity factor is considered useful in the invention. Given its ability to decrease the expression of a virulence factor, such a molecule may be used, for example, as a therapeutic to combat the pathogenicity of an infectious organism. Thus, if the pathogenic cell is Pseudomonas aeruginosa, the candidate compound identified by the present screening methods may be useful to treat humans and plants that are infected or are at risk of being infected with the strain of Pseudomonas aeruginosa which expresses the virulence factor to which the candidate compound is specific against. Accordingly, therapeutic compounds useful for treating disorders such as cystic fibrosis may be identified using the screening methods of the invention.

[0240] Alternatively, or in addition, candidate compounds may be screened for those which specifically bind to and inhibit a pathogenicity polypeptide of the invention. The efficacy of such a candidate compound is dependent upon its ability to interact with the pathogenicity polypeptide. Such an interaction can be readily assayed using any number of standard binding techniques and functional assays (e.g., those described in Ausubel et al., supra). For example, a candidate compound may be tested in vitro for interaction and binding with a polypeptide of the invention and its ability to modulate pathogenicity may be assayed by any standard assays (e.g., those described herein).

[0241] In one particular example, a candidate compound that binds to a pathogenicity polypeptide may be identified using a chromatography-based technique. For example, a recombinant polypeptide of the invention, such as the polypeptide encoded by ORF7, may be purified by standard techniques from cells engineered to express the polypeptide (e.g., those described above) and may be immobilized on a column. A solution of candidate compounds is then passed through the column, and a compound specific for the pathogenicity polypeptide is identified on the basis of its ability to bind to the pathogenicity polypeptide and be immobilized on the column. To isolate the compound, the column is washed to remove non-specifically bound molecules, and the compound of interest is then released from the column and collected. Compounds isolated by this method (or any other appropriate method) may, if desired, be further purified (e.g., by high performance liquid chromatography). In addition, these candidate compounds may be tested for their ability to render a pathogen less virulent (e.g., as described herein). Compounds isolated by this approach may also be used, for example, as therapeutics to treat or prevent the onset of a pathogenic infection, disease, or both. Compounds which are identified as binding to pathogenicity polypeptides with an affinity constant less than or equal to 10 mM are considered particularly useful in the invention.

[0242] Alternatively, a candidate compound may be contacted with two proteins, the first protein being a substantially pure polypeptide such as an isolated bacterial virulence factor (e.g., any one of SEQ ID NOs: 127-229 and 278-280) and the second protein (e.g., a human lung protein having an amino acid sequence of any one of SEQ ID NOs: 269-277) being a polypeptide that binds the first protein under conditions that allow binding. In this respect, the second protein may be any protein that under normal conditions binds the first protein, or alternatively may be an antibody or an antibody fragment. For example, the candidate compound may be contacted in vitro with the polypeptide encoded by ORF7 which is substantially identical to the amino acid sequence of SEQ ID NO: 280 or SEQ ID NO: 278 and a human protein which is substantially identical to any one of the amino acid sequence of SEQ ID NOs: 269-277. Under the appropriate conditions, the polypeptide encoded by ORF7 binds a human protein, such as a lung protein. According to this particular screening method, the interaction between these two proteins is measured following the addition of a candidate compound. Thus, a decrease in the binding of the first polypeptide to the second polypeptide following the addition of the candidate compound (relative to such binding in the absence of the compound) would identify the candidate compound as having the ability to bind the first protein and as having the ability to inhibit the virulence of a pathogenic organism. Contacting of the candidate compound with the two proteins may occur in a cell-free system or using a yeast two-hybrid system. If desired, the first protein or the candidate compound may be immobilized on a support as described above or may have a detectable group. Alternatively, the candidate compound may be expressed on the surface of a phage or may be expressed using RNA display according to standard methods.

[0243] Potential antagonists include organic molecules, peptides, peptide mimetics, polypeptides, and antibodies that bind to a nucleic acid sequence or polypeptide of the invention and thereby inhibit or extinguish its activity. Potential antagonists also include small molecules that bind to and occupy the binding site of the polypeptide thereby preventing binding to cellular binding molecules, such that normal biological activity is prevented. Other potential antagonists include antisense molecules.

[0244] Each of the DNA sequences provided herein may also be used in the discovery and development of antipathogenic compounds (e.g., antibiotics). The encoded protein, upon expression, can be used as a target for the screening of antibacterial drugs. Additionally, the DNA sequences encoding the amino terminal regions of the encoded protein or Shine-Dalgarno or other translation facilitating sequences of the respective mRNA can be used to construct antisense sequences to control the expression of the coding sequence of interest.

[0245] The invention also provides the use of the polypeptide, polynucleotide, or inhibitor to Interfere with the initial physical interaction between a pathogen and mammalian host responsible for infection, for example. In particular the molecules of the invention, for example, may be used, for example: in the prevention of adhesion and colonization of bacteria and binding to mammalian extracellular matrix proteins; to extracellular matrix proteins in wounds; to block mammalian cell invasion; or to block the normal progression of pathogenesis.

[0246] The antagonists and agonists of the invention may be employed, for instance, to inhibit and treat a variety of bacterial infections.

[0247] Optionally, compounds identified in any of the above-described assays may be confirmed as useful in conferring protection against the development of a pathogenic infection in any standard animal model (e.g., the mouse-burn assay described herein) and, if successful, may be used as anti-pathogen therapeutics (e.g, antibiotics).

[0248] Test Compounds and Extracts

[0249] In general, compounds capable of reducing pathogenic virulence are identified from large libraries of both natural product or synthetic (or semi-synthetic) extracts or chemical libraries according to methods known in the art. Those skilled in the field of drug discovery and development will understand that the precise source of test extracts or compounds is not critical to the screening procedure(s) of the invention. Accordingly, virtually any number of chemical extracts or compounds can be screened using the methods described herein. Examples of such extracts or compounds include, but are not limited to, plant-, fungal-, prokaryotic- or animal-based extracts, fermentation broths, and synthetic compounds, as well as modification of existing compounds. Numerous methods are also available for generating random or directed synthesis (e.g., semi-synthesis or total synthesis) of any number of chemical compounds, including, but not limited to, saccharide-, lipid-, peptide-, and nucleic acid-based compounds. Synthetic compound libraries are commercially available from Brandon Associates (Merrimack, N. H.) and Aldrich Chemical (Milwaukee, Wis.). Alternatively, libraries of natural compounds in the form of bacterial, fungal, plant, and animal extracts are commercially available from a number of sources, including Biotics (Sussex, UK), Xenova (Slough, UK), Harbor Branch Oceangraphics Institute (Ft. Pierce, Fla.), and PharmaMar, U.S.A. (Cambridge, Mass.). In addition, natural and synthetically produced libraries are produced, if desired, according to methods known in the art, e.g., by standard extraction and fractionation methods. Furthermore, if desired, any library or compound is readily modified using standard chemical, physical, or biochemical methods.

[0250] In addition, those skilled in the art of drug discovery and development readily understand that methods for dereplication (e.g., taxonomic dereplication, biological dereplication, and chemical dereplication, or any combination thereof) or the elimination of replicates or repeats of materials already known for their anti-pathogenic activity should be employed whenever possible.

[0251] When a crude extract is found to have an anti-pathogenic or anti-virulence activity, or a binding activity, further fractionation of the positive lead extract is necessary to isolate chemical constituents responsible for the observed effect. Thus, the goal of the extraction, fractionation, and purification process is the careful characterization and identification of a chemical entity within the crude extract having anti-pathogenic activity. Methods of fractionation and purification of such heterogenous extracts are known in the art. If desired, compounds shown to be useful agents for the treatment of pathogenicity are chemically modified according to methods known in the art.

[0252] Pharmaceutical Therapeutics and Plant Protectants

[0253] The invention provides a simple means for identifying compounds (including peptides, small molecule inhibitors, and mimetics) capable of inhibiting the pathogenicity or virulence of a pathogen. Accordingly, a chemical entity discovered to have medicinal or agricultural value using the methods described herein are useful as either drugs, plant protectants, or as information for structural modification of existing anti-pathogenic compounds, e.g., by rational drug design. Such methods are useful for screening compounds having an effect on a variety of pathogens including, but not limited to, bacteria, viruses, fungi, annelids, nematodes, platyhelminthes, and protozoans. Examples of pathogenic bacteria include, without limitation, Aerobacter, Aeromonas, Acinetobacter, Agrobacterium, Bacillus, Bacteroides, Bartonella, Bortella, Brucella, Calymmatobacterium, Campylobacter, Citrobacter, Clostridium, Cornyebacterium, Enterobacter, Escherichia, Francisella, Haemophilus, Hafnia, Helicobacter, Klebsiella, Legionella, Listeria, Morganella, Moraxella, Proteus, Providencia, Pseudomonas, Salmonella, Serratia, Shigella, Staphylococcus, Streptococcus, Treponema, Xanthomonas, Vibrio, and Yersinia.

[0254] For therapeutic uses, the compositions or agents identified using the methods disclosed herein may be administered systemically, for example, formulated in a pharmaceutically-acceptable buffer such as physiological saline. Treatment may be accomplished directly, e.g., by treating the animal with antagonists, which disrupt, suppress, attenuate, or neutralize the biological events associated with a pathogenicity polypeptide. Preferable routes of administration include, for example, subcutaneous, intravenous, interperitoneally, intramuscular, or intradermal injections, which provide continuous, sustained levels of the drug in the patient. Treatment of human patients or other animals will be carried out using a therapeutically effective amount of an anti-pathogenic agent in a physiologically-acceptable carrier. Suitable carriers and their formulation are described, for example, in Remington's Pharmaceutical Sciences by E. W. Martin. The amount of the anti-pathogenic agent (e.g., an antibiotic) to be administered varies depending upon the manner of administration, the age and body weight of the patient, and with the type of disease and extensiveness of the disease. Generally, amounts will be in the range of those used for other agents used in the treatment of other microbial diseases, although in certain instances lower amounts will be needed because of the increased specificity of the compound. A compound is administered at a dosage that inhibits microbial proliferation. For example, for systemic administration a compound is administered typically in the range of 0.1 ng-10 g/kg body weight.

[0255] For agricultural uses, the compositions or agents identified using the methods disclosed herein may be used as chemicals applied as sprays or dusts on the foliage of plants. Typically, such agents are to be administered on the surface of the plant in advance of the pathogen in order to prevent infection. Seeds, bulbs, roots, tubers, and corms are also treated to prevent pathogenic attack after planting by controlling pathogens carried on them or existing in the soil at the planting site. Soil to be planted with vegetables, ornamentals, shrubs, or trees can also be treated with chemical fumigants for control of a variety of microbial pathogens. Treatment is preferably done several days or weeks before planting. The chemicals can be applied by either a mechanized route, e.g., a tractor or with hand applications. In addition, chemicals identified using the methods of the assay can be used as disinfectants.

### Other Embodiments

[0256] In general, the invention includes any nucleic acid sequence which may be isolated as described herein or which is readily isolated by homology screening or PCR amplification using the nucleic acid sequences of the invention. Also included in the invention are polypeptides which are modified in ways which do not abolish their pathogenic activity (assayed, for example as described herein). Such changes may include certain mutations, deletions, insertions, or post-translational modifications, or may involve the inclusion of any of the polypeptides of the invention as one component of a larger fusion protein. Also, included in the invention are polypeptides that have lost their pathogenicity.

[0257] Thus, in other embodiments, the invention includes any protein which is substantially identical to a polypeptide of the invention. Such homologs include other substantially pure naturally-occurring polypeptides as well as allelic variants; natural mutants; induced mutants; proteins encoded by DNA that hybridizes to any one of the nucleic acid sequences of the invention under high stringency conditions or, less preferably, under low stringency conditions (e.g., washing at 2×SSC at 40° C. with a probe length of at least 40 nucleotides); and proteins specifically bound by antisera of the invention.

[0258] The invention further includes analogs of any naturally-occurring polypeptide of the invention. Analogs can differ from the naturally-occurring the polypeptide of the invention by amino acid sequence differences, by post-translational modifications, or by both. Analogs of the invention will generally exhibit at least 85%, more preferably 90%, and most preferably 95% or even 99% identity with all or part of a naturally-occurring amino acid sequence of the invention. The length of sequence comparison is at least 15 amino acid residues, preferably at least 25 amino acid residues, and more preferably more than 35 amino acid residues. Again, in an exemplary approach to determining the degree of identity, a BLAST program may be used, with a probability score between e⁻³ and e⁻¹⁰⁰ indicating a closely related sequence. Modifications include in vivo and in vitro chemical derivatization of polypeptides, e.g., acetylation, carboxylation, phosphorylation, or glycosylation; such modifications may occur during polypeptide synthesis or processing or following treatment with isolated modifying enzymes. Analogs can also differ from the naturally-occurring polypeptides of the invention by alterations in primary sequence. These include genetic variants, both natural and induced (for example, resulting from random mutagenesis by irradiation or exposure to ethanemethylsulfate or by site-specific mutagenesis as described in Sambrook, Fritsch and Maniatis, Molecular Cloning: A Laboratory Manual (2d ed.), CSH Press, 1989, or Ausubel et al., supra). Also included are cyclized peptides, molecules, and analogs, which contain residues other than L-amino acids, e.g., D-amino acids or non-naturally occurring or synthetic amino acids, e.g., or amino acids.

[0259] In addition to full-length polypeptides, the invention also includes fragments of any one of the polypeptides of the invention. As used herein, the term “fragment,” means at least 5, preferably at least 20 contiguous amino acids, preferably at least 30 contiguous amino acids, more preferably at least 50 contiguous amino acids, and most preferably at least 60 to 80 or more contiguous amino acids. Fragments of the invention can be generated by methods known to those skilled in the art or may result from normal protein processing (e.g., removal of amino acids from the nascent polypeptide that are not required for biological activity or removal of amino acids by alternative mRNA splicing or alternative protein processing events).

[0260] Furthermore, the invention includes nucleotide sequences that facilitate specific detection of any of the nucleic acid sequences of the invention. Thus, for example, nucleic acid sequences described herein or fragments thereof may be used as probes to hybridize to nucleotide sequences by standard hybridization techniques under conventional conditions. Sequences that hybridize to a nucleic acid sequence coding sequence or its complement are considered useful in the invention. Sequences that hybridize to a coding sequence of a nucleic acid sequence of the invention or its complement and that encode a polypeptide of the invention are also considered useful in the invention. As used herein, the term “fragment,” as applied to nucleic acid sequences, means at least 5, 10, 20, 30, 50, 100, 200, 300, 400 contiguous nucleotides, preferably at least 500 contiguous nucleotides, more preferably at least 600, 700, 800, 900 to 1000 contiguous nucleotides, and most preferably at least 1100, 1200, 1300, 1400, 1500, 1600, 1800, 2000, or more contiguous nucleotides. Fragments of nucleic acid sequences can be generated by methods known to those skilled in the art.

[0261] The invention further provides a method for inducing an immunological response in an individual, particularly a human, which includes inoculating the individual with, for example, any of the polypeptides (or a fragment or analog thereof or fusion protein) of the invention to produce an antibody and/or a T cell immune response to protect the individual from infection, especially bacterial infection (e.g., a Pseudomonas aeruginosa infection). The invention further includes a method of inducing an immunological response in an individual which includes delivering to the individual a nucleic acid vector to direct the expression of a polypeptide described herein (or a fragment or fusion thereof) in order to induce an immunological response.

[0262] The invention also includes vaccine compositions including the polypeptides or nucleic acid sequences of the invention. For example, the polypeptides of the invention may be used as an antigen for vaccination of a host to produce specific antibodies which protect against invasion of bacteria, for example, by blocking the production of phenazines. The invention therefore includes a vaccine formulation which includes an immunogenic recombinant polypeptide of the invention together with a suitable carrier.

[0263] The invention further provides compositions (e.g., nucleotide sequence probes), polypeptides, antibodies, and methods for the diagnosis of a pathogenic condition.

[0264] All publications and patent applications mentioned in this specification are herein incorporated by reference to the same extent as if each independent publication or patent application was specifically and individually indicated to be incorporated by reference.

[0265] Other embodiments are within the scope of the claims.

The application's sequence listing, which the Patent Office published only in electronic form, follows.

SEQUENCE LISTING (290 sequences)

SEQ ID NO: 1 - DNA, 10848 bp, Pseudomonas aeruginosa
ttttcgaaggggcgagttgcacaggcctaggaaggggtgttgcaccttttacttgtccagcagccgtctgggccgaacattaggcccgcattgacgtgatgtcaatatggaatagcccgcctatttaggtgggcttttctgtttttcaggccctgaaaccattctgcaggcgtagcaatgtgccctcgacgtaatcagcgattacagagggtactgcggtttcggccttgaaattgcggggctctgccagcatgccggcgctggaatccaggcgctctcggtaattccagatttttcctacaggcctagcgaactgctgggaggcgcagctacctttcgtccggtagccggcccctcagtatcggtatcgctaggcgagactgcttcgggcggtagatccccatcctccagatccgcttgttgcggtggaagccgcggaggccgtggcggcacggttcgataggtgttgagccatcagagtgaacagcacgctttgctcgaaggtgtcaggtggctgtggtagcgcttcttcccacgcggttgcatctccctgaatgcctgtccctggtgtgtgctcccttggttctgcaggttctgtcctagcctcctgtggcggcgcttcacccattcgagcgagaggttgcccgcatggcttcggtttggcagaggcttgcggggagccgctgtaatccaccttcctgacgttctccagcgctccttgggccaggcttctggcatgcagcacggcacgcatgtggtcgtagtcggcctcgatgtagctcatggtggtctggatattcgagtggttgagcaggcacttcgtgaggtggatgttccgctcgggtgccttcatcaagtcggtggccagggtgtgccggaaacggtgcggagtcatccgcaccccaaccttctcggtcaacttccggtacatggcttcgacctggtcggagttcatcaccttgctcttgtagtgcggtgagaaccggttgacgttgaacaactggtcgtcatcggcgaatccggctctatcggcctcctgcaggagccgcgataggtgaggcacaagcccctccgttattggcactacgaactctttatgagttttctctgtctcgccgcggatgaggatcagttgattttcccagtcgatgtcgcgcttgcggatgcacaacagcgcattcaaccggatgccggtgaagtagaagacctcaaacgtgcaaagccagaaccaggcgggagtgatgcgtgcgcgatcgccagtgcagcgctcggcgccgacctgcatgttgagccaattgcgggcgcgcaggatggcttcggctgcgacggttttgcttgctcgcctgggggggatgacggtggtctttctgaacgggttgacttgggagtgtgtcaccagctcgtgctcgatggcatagccccagatcgttcgcagatgattcgaatacgtgttccagctccgcttcgacaggccttgttccaggaccttgcgccgccatcccagcacagacctgtggtccacctcctgtacggttgccgtagggccgaagtgcttgagcagcgccttggtcgcggcgcggtagatcttcgcgctggcttctcggagatcgtgcgcgaagatgtactcctcggtgagctgctgcggcgtcattccacacctccttcggcatcggtgatgaccgtgaggcttgggttgtccagaggctgcacagggaacagcaatttgggatcctggagcaggtaggccttgagctctttcgtcttgcgaggaccagaaaccttgatggtccagatattcaggttcttactggtctttcggtgaagaccctgtttctcgaacgcgcgctgcaccagcttccagccggcggtctccttggcctgggccagcttttcaacctccggatgctcctggacataacgcttgaagattcctggcgtgaccagcatggcggtcccgtcgacggtatgcaccaaagccttggtgtcgttgatgaacaggcgacgggtcgcgataccagatttcatccagccaatgaatccctgtcccagatcagtgcttctgctaggcataaatacatcttcaattgcttcaggagcgcaatctgtagtggtcaacccatcccggacagtgggttgagtttttcttcggccaccgcaggtggtaacccgtcgttgaattgatgcggcctgatccagttgtagcggtgcatcaagtaatgactgatgtcccgttgggcctcctgcgccgtcaggtaacccgttgacgggacccactccgacttcagactgcggaacaggcgctccatcggcgagttatcccagcaattcccccgacggctcatgctctgctgcatccgatagcgccagagccgttgccgaaacaggcggctggcgtactggctgccctggtctgaatggaacagcacctgctgtggcctgccgcgctgttcgtaggccatgtccagggccttgatcaccagttcggcatccggcttggccgagaacgcccagccgatcagcagatccagcaccgcggccaggtagtgccaacggccttgcgcccagacgtaggtgatgtcgccacaccacacctgtatgggatgctcggtcgcgaattcgcggttcagccgattcgggatatccggccgctcaaccgtggcctgtttgtaggcgtgcgagcccggttgcttgctgaccaggcccagctcacgcatcaaccgacgcactcggaaacggccgatggtcacgccctcttcgcgcagcatgcccagaatgctgcggctgccggccgagccccgactctggctgaacaactggttgacttggctgcgtagcgccacgcggcgagcatcgacacgccgccgtcgaagacggtggacgtagtagcaagaccgcgccacatcgaaagctgagcagaccacttccaccgactcctgctcactcaactggtctatcagcgcgtacgatcgagttcgtccgacatcaagagagcggtagccttttttaatatcgctttctcccgctccaatcggttgatccgggcttccagctcctggatcttttgctgctcaggcgtcaacgccttgctcttcggggtcacaccctggcgctccgcctcgagctgcttcacccaacggcgcaaggccgaatccaccacccccagcgaacggcaggcgtcgatatggctgtagccttggtccaacaccagggccgcggcctctcgtttgaactcggcggaaaacgtacgtcgttgcttgctcatcagacacctctttcacggcgaggattctcgcctaaatcggtgtccgggatcagtagaccactacactgccgaaacagttatttttgttgctaagaggcaggaaggctgcgctgagattcctactagtgaattagatagttgttgtcttctgaaacagaactgaagcgaaattgggggtagggtttttctaggtgaagggtaactcttgagaattacaaaggtgtgacgcaaatgttgtatttttcttgcagtatgaagatgggtggttgggtcggatataggtacttctctctattttctttaattgctctcatctatgggtgtgtcggtggtggaggtggatcggatgagattgggcagcactgctttgagagagagcaaaagctttccggagttaatgataatgaagaggggagtgtgaggttgaatcggctgaactgcgatccaattgaaggtcgtgttcttgaatcagagaagctgataagaaagccgcccaatgagctgggtattcactgagttaataatttttagcctggagaggtctttttgaaaatgaaaaaatcacttgttatgtcggctgtgcttttggtggctagcaatttcgcgtgtgctgatgagggctcaaatgatggaagtgagatatgtcgggcgcagggtggagttgaaataacaagtctgggggaagtctcaaagggtgtggatgttgaagatgttgtagtttgttcgattcttccaagtaatatgaagtcgagtcaaagagcgcctacactccctcctctgcaaaggatgatcatttcggcaatgccttcaccaggaacggtcactgtttctgccagcggagataggaaatttacaacatcttgccgggcaaatctttatgctccacgttatgccaatttctatccagacggtgttagcaggggaacatcagatctacgatgtgttggttacaatacacccgggaattcatctcaagggtgtaatgtgtcatgggacggcccgaccgacattcaattgggtgttgagccatatggcggatctgttgttgtaaactacagttgcactgcattcaaaacaacgattccagtgataatgagctacagttatcgtgatgggcgggcagtgtatggcgaggtccagaatgtgtcaggaataataaatgtggttttgaactaaggatgcgccttagtaggattttatttcaaggtgttcagcttgtgaatgtgctgcagggcactctatagagtgccctgcataggctggaagtcgtttggctgagggctagtctttcgagttcgatatggcacgttgatgaaggctggtaaaaagtcctgtctgtgtgggtggcaggcgagtggcgcgttcagacgctaatgtggagttcaaggtagggttccgacgccgaggatcctctttgggtggagtcatttgctgagccatgcagttataagacaggctacgtgctccattgacttggacatcgatacacgaagattcagattgttccgagtgtgactctgcgggcggggaggcagcagcctgctgtgccaaaccaactataggcaacaagaatataattcgaagaattttaataagcattccaatctccttaaccctgagggttggatgagactcaatagtaacctcaagttatgaggaaagatgaaccgcctatcgttttgtagtcttggttaggtcaggcacacgctagtgagtagtactaagagtaagccgatagccagggggcgtggtggcccatttggggaagtgatgaagaggtgcgggcttgtaccggttcgaggaaggaatagacagcagacaggatcgcttgcgatggggcagcaggaaaccatcagcccgtccgtatccagaactgctgcttgcagcgttaggggtgactccctcatgccctagagggcataatccctgtatggagatggctaactgatattaaggagtggtcgaagtcatggaacgcttgctcgagagcatttacatcaatgcccggccggcgatggagttgaggcttagcctcaccagctccggccgcaagagaatggtaaagattgtggatggggaggaggtcgaggttctgccaggtgaagtgcagggcatcctggaggcccaaaagagggatgttggaatcctcgccgacttcttagccaagagtctcgtggcgcgacgctagagatccttggctagccagtctatcgccgacagcaacgtggtctcgtcggccatgccttcaagcttcacgcttcgtcctgtctggttgtcccggatgacgagggtcggggtcgctgtaatgcccttcgactgtgcggtgtcgatgttcgtaagcgtccggggaaggcacattgcgatgcgctaagctgtaatcctttaggattgaggtctcagcatggaatgccacgttcgtcccgccacgagcagagatgcagcagcgataagctgcgtagttatagccgccctgcgtgagtcaaattcacaggactatccgcctgatgtgatcgctcaggttgagcagagcttttctcctgaagccatcaccacacagcttacgaagcgtagggtcttcgtagccttattgggcgaaaacattattggcactgccggtctcgacggtgacgtcgtcagaagtgttttcgttgacccagctcaccagaaaggcggtatcgggcggcatttgatggatgtcattcatacaactgctgccagcgcgggagttggagctgtacgtgtgccatcgtcgattacagctgaaaggttttataccgcattgggttatcagaaaatccgcgacgagtttcatggggcggagcgcaccatcgttatggagaagcggctgtaggattattccagactatttacccacttatgcggcaacaaatcagtgatctcactggcccgctgcgtgggcagccgcgtcagcacatctttgagataggcatacggatcatgcccattcatacgcgccgactagatcaggctcatgattgcagccgcccgtttaccactgcgcagcgacccggcaaacagccagttcgaacgcccgagcgcccatggccgtatttggttctcgacctgattgttatcgatgggcacagccccatcgtccaggtagcgcgtcagcgctacccagcgtttcaggctgtaatcgagggctttggccgtggctgatccattgggcaccaggtctcgctgagccaacatccagtcatgcagttttttgaggatcggcaccgccaattcttgtcgtattcgccagcgctcttcatcactcatgtcccgcgcctgacgttcgacctcgtacaagccgctgatcgagtgcagggcctgttcagccagctgacttttgttcgccacgtgcaaatcaaagaacttgcgccgggcgtgggccatgcagccgatttcagtgatgccttgttcgaaaccggctttgtagccagcgaagtcgtcgcagaccagcttgccgttccagtcacccaggaagttgcgcgcatgttcgccagcacggcttgggctgaagtcgtaaaccaccgctttgagccctgaaaacggcgtcgtgctgtacgcccagacataggcccggtgggttttcttctcgcctggcgcaagcatttgcaccggtgtttcatcagcgtggatcacgccctggttcagcacggcttcacgcagtgcatcgaccagtggctgaagccgcacgccggtttgtccgacccactgcgccagggtcgagcgagcaattgccagcccggcgcggccaaagattttctcctgccggtacagcggcaagtgatcggcaaacttggccaccatcacgtgggccaacaaacctgcggtcgggatacctttgtcgattgacctgccccccgatttcagtaccacgctgaacttagtagaatccgttttccaagcaggagacggcagtgcagaagcgttcttctcgacttcctcaagcgggtcgaggctagtgtaccgaccgagctgcacgcccaactggtggaactggcccaggagtatcgacgctgtagctaacgccgcctgcacatcctgctgtggcgtgcaggtcaaccacaagcggatttaccggctgtaccgagccgccggcttgatggtgaggcggcggagggtcgcggtggcgcgcgaatgcctgagcctgtcgagcgcaccgaaccaggtcttgtcgatggatttcgtcttcgacgcgctcagcactgggcgacggatcaaatgcctgacggtggtcgatgacttcaccaaggtgtcggtcgacatcttggtggagtacggtatcagcggttttcgtgtcacgcgggcgctggacgagatggcgcggtttcgtggctacccgcaggcgatccgcaccgaccagggccccgagttcaccggcaaggcgcttgatcagtgggcctgtcagcgtgacatcaagttgaagctgattcagcctggccagcccacgcagagcgccttcatcgagtcattcaacggcaagttccggggcgaatgcctcaatgagcactgctcgctggtcgaagccagaatccgtatcgcggcttggcgggattacaacgagcaccgaccacacagcgccattggcaatctctccccggcagagcttgctgcgaagtggcgaaccaaccagcagcagctgaagcgggaaaagttgatatcaaccccatagcctactaactaggcagcggtactaaaactgggggcaggccagtccgaactgataaaaaaacgtccgaaactggcaaaaccttatggccggttttcctaatatttgctccgaaccctcggtatttcaaggagcgaacatgcatatccaatcgttgggggctactgcctcctcgctgaatcaggagcctgtcgaaaccccgtcgcaggcagcgcataagtccgccagcttgcgtcaggaaccttcagggcaaggtctcggggttgccctaaagagcacgccgggaatactttccgggaagttgccggaaagcgttagcgacgtgcgtttcagcagtccccaagggcaaggggagtcccgtactctgactgactcggcagggccgcggcagatcactctgcgccagtttgagaacggagtcaccgagctacagctcagtcggccaccattgaccagtctggtcctaagcggcggtggtgccaaaggtgcggcatacccgggagcaatgctggcgctagaagagaaaggcatgctcgatggcatccgcagcatgtccggttcgtccgctggcggcatcaccgccgcccttttggcctcaggtatgagcccggcggcgttcaagaccctttccgacaagatggatcttatttcgctgctcgacagctcgaacaagaagctgaagctgttccaacacattagcagcgagatcggcgcatcgctgaaaaagggcttgggcaacaagatcggcggcttctctgagttgctgctcaatgtactcccacgcatagattcgcgggctgagcccctagaacgcctattgcgcgacgagacacgcaaggccgtgctcggacagatcgctacgcatccagaggttgcacgccagccgaccgttgccgccatcgccagcagattgcagtccggctccggagtcacctttggcgatctagatcggttgagtgcttacattccccagattaagacgctgaacatcacaggtacggccatgttcgaggggcgtccgcaattagtggtgttcaatgccagccacacaccggatctggaggtcgcccaggcggcacatatctccggttccttcccaggagtgttccagaaggtcagcttgagtgatcagccgtaccaggccggcgtagagtggacagaattccaggatggcggggtgatgattaacgtgccggtccctgagatgatcgacaagaattttgacagcgggccactgcggcgcaacgacaacctgatccttgagttcgagggcgaagctggggaggtagcgcccgaccgaggtactaggggcggcgcgctcaagggctgggtcgtcggggtgcctgccctgcaggcgcgcgaaatgctgcagctcgagggcctggaggaattgcgcgagcaaaccgttgtggtgccgttgaagagcgagcgcggtgatttcagtggcatgctcggtggcaccttgaacttcaccatgccggacgagatcaaggcgcatcttcaggagcgcctccaggagcgagtcggtgaacatctggagaaacgtcttcaggcttcagagcgtcataccttcgcttctctcgacgaggcgctgctggcacttgatgacagtatgctcaccagtgttgctcaacagaacccggagatcacagacggggcggtggcttttcgccagaaggcgcgggatgcgttcaccgagctgactgtcgctatcgttagcgccaatggcttggcgggtaggctcaagttggacgaggctatgcgctccgctcttcagcgactcgatgcgctggcagatactccggaacgcctagcatggttggcagctgagttgaaccatgctgataacgttgatcatcagcagttactcgatgccatgcgcgggcagacggtgcagtcgccggtgctcgccgctgcgttagcagaggcgcagcgccgcaaagtggcggttattgccgagaacattcgtaaggaagttatcttcccctctctgtatcgccctggccagccggattccaacgtagctctgttacgtcgggcggaggagcagctacggcatgccaccagtccggcggaaatcaatcaagcgctgaacgatatcgtcgacaactactcggcacgaggcttcctgcgtttcggcaaacccttgagttcgactaccgttgagatggctaaggcttggcggaataaggagttcacatgattgatacatggctggcacagtggggcttgagacttccctcgagcaacgatgccacgttgcggctgcaaccggcagagggaccggaactggttatggagcgcctcgagggcggttggcttttcgtcgtcgagttgggacttgtgccttcagggttaccgctgggtgtgatcttgcaattgttacaagtgaactctccattctcatccttggcaccggtgaaacttgcggcggacgatgccggtagacttgtgctctgggctgaggcacgtgatggcgttgacgatgtggatgcactgaaccgcttgcacgataggctgcgggaaggacattcacgattagtgccattgctagagcccacgggtgagttggttccagctcagatacaaaccagcgcgttagtgttcgtttgaacgcaaggggaaggagcgatactgccaataaaatccgcagttggtaatttctctaatagatgggccacccgaaggtggcctatctgttcatgctgcaatgagttgtcgtgccaacaccatttctaccgagccccatcctggttcaacgagccgaggccctcgaggtgggcttttctgtttctggagtccggatatctgatccacagcgcgccagaacgagcggctggtttcgtgctttcgccagttatatcggcactggcccacattcgtgtgcctgccagtctgtttccat

SEQ ID NO: 2 - DNA, 84830 bp, Pseudomonas aeruginosa
caccggcgatgcatgggatgccgtaggggtcgctgatccagccgaggccgccctggatggttttctggtcggcgctggcggtctggttgttgttgctctggttgtcattcacctcctcggccggcgccgggaaggtgcgcacggtcccgtcgttgaacacgaacgtgaggctgcggatctgcccacgcacgcaggagagtgtccagtcgcccgaggcggtcccgctggctaccgcgccggcgacgtccggcagctcgatgccgttggcggtgaggttgtccgggccgatgaggattttgaacgggtaaggatcattgaccgtcccgtcgaccggcacacgaccgatcagcgcaaacatggccaccgagcccatgagcgtcgagttctgcggcagcgtgtaggtcttacggacgagcttgcggttttccaggtcagatcgctgttggccgacggggtgcagcccgtcatcgatccgctccagcgcgttctgtccgcgatcgaccgcattgccgaaggaggtcgggaagctgaatccgctcggttgggtggtggagccggcggccagcggctggccattggcatcaaccgcgcgggcgtcctggggctcgatccagacgatatccgatgaagacgagcccgctccctgaaagtgctggccatcctttggtcgcacgccgaatcctacgggcaggtcggtgtcaccggcctcgggaatgtgggttaggttctcgagccgtttctgtacctggtccaggatcgtctggctacggttttcctgctgttgctgcagttcctgggcggtgttgttgagcttctgctcgatgttctgatcgatgttgcgcaggcggccctgcaggttctcattggcggctttgagcgagtcattctcctggatcaccttgctgatctggtccttgagctgccggctttccgccacgatggtgcgtagtgtgtcggcgggcgtgtcgccgtcgatgcccagggttgccgcttcttccgacgttaccgtcggggttgcggcgccttgtgactgcgcactttctttcttgcccatcatgctcacgccgatcaggatggcgccgatcacgacggggacgaccagcaatttcaggaggggattaccggtcagcgccacgacggcctcctttgggatcgatctggctgatggaggagggcaggagcgcgtcggcaaggccgcggccgcgcgtcaccagatacacggtagtggtgtcggaggcgtcgccccggggccccaagtacgggtgctggaaggtcgcggcgacgaaattgcccatcaggtccctgggatccagggccaggtgctgggcgctggcgttctgcagcttcaccgccgtgatgtagtagtcgtccagccgccaggcgcccaaggcggtagccgtgatgggtaggctggggagcagggtggtcaggtcgagctgtcgcttgacgcgcacctgaccgacgccatccaccggttccaccgtgcgaagcggggcatagagcatctgcgccgcatagcgcgtcagaaccacggggacgggcgtttcgcgcggcacggccttcggtgcttctgcgtgctcggtctgtttcgctgctgccgatggctgggcttcccgggactggccataatgcggatccactggctcgccggcgacgatcctgaccggctcgcgcggctgttggtcggccgttgcttcggtggcggcgatatcgatgagcatctgctcgccattggtcgcgtcctgtaggcgcaggcgcgctggaggaatcggctcgttggcgagcaggtagagtgcgccgccggtactctggacgcgcagcttgccctgcagatcccgaggaaccccaactcgcacgtttctgtcgacgaaaacaatgcgttcctggccgaccgtcaatggaatggccaacggaatgcgctcccagcgcagaatctccaccgcgtgggccagtgtgggtagggcaagcattagcaagagcgagcctgtcgacttccggatcatagacctccctcccgcttggtgggggcggccggctcctcaagctcgatacgttgaggcgtgtcggagtagcagtcccactgcaggccgaagggattggtttccgggtcgacgtcggcgcggataacgtgcaacgggtagcgggccagcgcccgcttgatcttctcgccggcgtaatactccgtgctgtccatgtccaagttgacggtccagtcattgatcgagtgctggatcacgcggccattgctctcgccaatgcctcgaccggggatttccgaggtggtgcgctcgcgacccctgagctcgccggcgttacgacgaaactcaaagtctttctccaggaagactttgcaggagggagtgaggtaggcagcgtagcggaacaggtttcccttgtagtccacctcgccgtccttgggccaacgctgcacctgctggaagatgtagaggccgaacgcatagacgctctctggcggaatgtcccaccacaaccgggtgcttcctgagcgcaagtcgggcggaatgtggatccagaggtccttacgggcttcccagacgcagtaggccagcacaacgatgaccatgcacaggaagccggtgatgaaccggaaggtgttgatgtgtgcctgctgttgcgcagtgtgttttctgaaactcatggggactccgtgcgtcgactggtccaggcgccggagcgcgtaaccaggcgacggttgccgaagacgggaaagcgcagcgagagggccatctccacctggcggtagaaccaggtatcgggccgcccccgcttcatccgccgcaggacgcggctgccgatacctaggccgagggcgccgaccagcagcgcgcccagtggaatgcaggcagcgttacctgcgaccaaggcagccgggatgccaagaacgaacccggctgctccgctggtgaagaccgtgatccacatttcgtctgcggtcaggccgccgatgactaccggttgccggttcaaacgggtcggcaggaagctgagggttccatcctgaaacagatgttcttcgggcatgggaaggcccttacatgatggcggtggctttggtgacgagataaatgatcaagatcagcaggccgacacctacggctacgcccgctccgagatccgaccacttcttcttcccgtcatggatggcgtgataggtgccgtaggtatgccaagcgacccccagaaagacagccgcgcagatgagcagcgcgaggagcatcgctccgtcatagccgaagttctggatggtttgcatgatgcccgatccctccccacggctaggtgcctcgggtttggggagtgcagccaaggcgataccggggagcgccaaagtgatggcggccaggctctggcagagggcggacagtttctggagggtgagtttcagcatgagtgtctccgtatgggtcagctgaggaggaagaaagaggtgatgccgaggaggaccaagatccgggatcgcggaagcgccaccggtggcgctgtcgaaggttgttggtggcccagccgcgccaggtgctgtacatcgcccaggcggaccacagcagaaggaaggtcatcgctgctccaatgaacagtccctcgccggccgatgggggaaagccagcggcggcctggaacgctgatgtctgggctccgctcatgctcatggcatcggccctccgcgcagggtgtaattccctgataagtcggaagggtcacgcggttgggcgcggctgggcgtcatgtagtcctgcaggccttggcggatgcgctgcaggtcagcggccaggcgcgggtagtcgaagtagaagcgctgtccgggctcatcggcgccctgggcactgcggcgggcggtgtcctcgagggcgttgagctgccggatcatcacctccaggttcgcctgctcggaggcgctcgctgcgaaagctccctgtgcgaccagcgcactgcaggccaagacggccaggcagcttcggcgaagggatggatgtggagtgttcacggcgaatctcgtgcagatcagggtgcgatcagcttgccgatcgccctgattccattccgcaagaaatactcggcgcgggtccggggtatttttttatgaggttgcgcgcttgaaaaacagcaggtagctgacgggcagagcgacgccccaagcccagccttgggcgttttgattaccgatctcggttacgccccgcatgagtggctgaacgctcaccagctcccagccttcctggcccagacgcacgacctcggcccagcgcagagggttgagcaaggcgtggtcgtcgggttccaaggtgtcttctttgtgtttgaacatcgcgacgcccttggtgagggttttgtagggaatgacgatgttctcgacatggtattcgaagggctgttttatgctcatggtgtgctcctggatcggttcgagtagaaccgcacggtttcaagagcaggaggagggcctcaaccgaaaatactaggcctagcaccagtgaatttctggtggttggcgggtttagagacacgtatggacgtctgggtgtatatttcatatatatttctaagggagacggctgatgcttagaaacatctctattggagttttgctagccatggctgctatgttgggcagttatggggtggctgccgctacattacgatgcgggtcggcaattgttagtgagggcgacttgattgatgatgtgcttagaaagtgcggcaaccctgatagccgtaaaattgaagggcccgcagtggatggtagtggctatatagtgcggggggctgctactgtcgaaaactgggtatatggaccaaggaatggatggtaccagaagcttaggtttgtcgatggaagactagttcagataaaaggcagtatggactagggtatagccgtggatggtgtgttttcatccacggctataagtctcatccggcagatgatataagggtaaggatatttgcgattggtaggccttgtgcgtcggaaataaacacggttgtactggcgcctgcacgggaaaactatctgttgtaggttgttcggattagacatgccaccgttgtaattggcttggaattgcttgctggaacttgctatgtctagaagttcaagtagagtgctttggttggcggattgtgcggagttcatgctgattgatgtgtttgatcctgtcgctcggagcgcctgctggatgttgtttgaagtgagttgggcaccattaaagttggcgctgaattttttagtgttgcccgcgatgttgatggcctgtaaaagggtggatatattcgccgcctgagcggtgttgacgctgatattggtacccgaggccgcagcgctgatcgcttgctgaaggttgtctgctgttagttgtgcaccattgaagtcggcgctaaactttttcgtgtctttggcagagttgatgagggctagtagggtgcttatattaaccgcctgtgcggtattgacgctaatggatgttcgggttcctgcggcgtctaaagcttgttgaatgttgtttgaagtaagttgagcgccattgaactctgcgctgaatgtttttgtgtcacctgctgcatgaatagtttgaagaagggcggttatatttgccgcttgtgcggtattgacgcttatgctggtgtttgttcctgccgcatttactgctctaagtaggttgtcgctgctgagttgggctccattgaattctgcgctaaaattctttgagttgcctgctgtagatattgcggaaagaagtgtgtttatattaatggcttgtgcggctattgtggatactctggttagtgatcctgctgagtttatgacttgctgaaggttgttagcagtcagctctgcgccgttgaaagttgttgagaggttttttgtgttttctgcagtggttgttgccttgagaagagtttctatatttaatgcttgcgcgttgcttatgctgatgcttgtattttttcctgcttttgatagggcctctagcatgttgcttggatttagaaggcgtccgtcgaaatcaaggataagtttcatctcaatgctccgctgtgacctaacgttaaagtcttggtgtgagtacttcctaggctgaatgagttggctacaaatctctttgccttatgtcaatatcaggcattcgctgtgaccaatatcattttttgagtcattttttacagctagctatctgctccttcagttttctgtcgtccacgtaccgctgcatgatcgacagcaccaggctgttgatggcaaggatcttcatcgcgcgggtcactgcgacgtagatcaggttcaactcatcgtcgcgcttgcctgggtcggtgtcgggggccagcgggtccgcgttgaagtcgtcgtacaggcaaacgaaatcccattccagccccttggccttgtgtgcggtggtcagggtgattgttgcgtccagctcatcgtcaagggtcagtgagcgaagctcaaggatccgcgcaggcagatcagggtaggtcgatatgatcttgatcgagcgaagcatctcaccgtcctggctgatctcggcgatctccacgtactgggtgtagtcgcggtagtcacggagcagtttcttgttctggacgttttggcgcaggcctcggctgaatgcgtacagatcctccaggtcgcgcagcgagtaactgtcgataccgcctacccagtggaatttgggctccggatgattgcggaccagctgcagggcattctcgatgacgccgataacggtgcggtgaatgaaagtgcggtgaggaaggtccggcgggagggactttttcaccagcgtctgcggacccagtccttgaagtttccgtgtttcgcccttgtaggagaggatgatgttggccacgtgtgcgatcgcggggccgaatcgccagctctgggtcaggtagtgctcctcggcgccggccatccagtcgctgttcagggcatcttctgcgcccctgaaccggtagagctgctgatggggatcgccgacgatagccattctgatgcgctgccaatgggcaatgtccgcgatcactgggttgatgtcctgcccctcgtccaggagcatgcagtcgaagcgctggctcaaatcgggcttgctcagttgatacagcttcaggtagccgtcaaggggcatcagcatgccggtgtcctggagatcgaccatgcgcctccagactactcgcgccatgtccaggccctgcttgaggaagcgttcctgagcactggtgaggaacgccttgtcgcggaagcgcgggaagtgcggtcggccgagttccgcgtcggcgctggccatgtagttgttcagcgtggccagcacgtcacgtaccaactcccagtcttgggtatcgagtccgcgggcgatatcggtcagtcgcaggttcttcgtcttcttgtgggcgtactgaatgccgtacaccgcatgagccagactgtgggcggtcttgcacactacgttgcggggaaacttgcccttcgcggctttctccaccgagctgttgtagcagagatagaggattctcagggtagggttcgacctggcaaagcccaccagggtggtagttttgccagtgcctgcgaaggctcgcaccaggatcttcggtgccttcgactggatgatcggtgactgttcgtgagtccactgcacggcgggtctcctacaggtactttttgaaggtggatgctgtgatgcataccgctacgccgagcagcgcggcgcagggcaacaggatgagcaggggattgatgctgatggggattgccaggtagagcgtccaagggacgaccgctagcggaatgatgctgccgcgcgccttgtggtagaggtagctggactcccggccggcgccgaacttgcgcaggtcccggcgcaccaggccgtccaccaggccggtgaacgcggccatcacgaataacgggatcgtcatgaccaggatcaccaggcgcacgacgaatgtcagcaccgtgtacagcgcggccaggccgtagttctgcagcgtggagacaccgtgggcggtgagatagcgaacgtccagcgggctccgtggccgggcctgcgcgatggtagtcatgttggtcatccagtcgaccatcccggtcttcacgaacaaccagtcataggccaactgggccagccaggtggcggttcgacctggctcctgcacgacgacgctgtgtagcagcccctgcgacagccaactgagttcgtactcaaacatggcctgggcatgcttccagcccgcgtcaggccagaagaaatacaggcatacccactccacgatgattgcgccgatcagcgacccgaacatcacgccgattcaggagcaggagtaggggggcaatcgaaaatgccaagactggtgccgtgggttttctggggtagccgcgggagaatgaacaaagatgttcaaacgttcctataggaaactgtgttgtgaactccatagaactccccttttacacgatgcaggttgttgcttggagtgtgtatccactagttctcggggaggccgtcactgtagattttttgggggggtatctcggcataggggggattgaatagcgctgtgcctgcagtcctgagacctcattaggaatcatctgatagagggaatttttccatgccgtcagtctttcggcatgaagttgaagaatttcttacagccttttgatagcggtttctccactccgagtgctgcgctcaagctgctccgcatgctcggtggcgccttgatgttgtgcgtgctatgcagcctgatattcagtgtgagcatggttttaaaccatcaggtgtccctcagtcggcaagctatgaatgtggctatgtacgaagcgcagctttatttcgagcagcgcgaggcgttgctcaatcacttgagcggcaatgtcgtgcccttggccgcgggtagagcgctcgtcaacgaagcgccgaacaatgtgagcatcctgccgttgagtgacggagggcgaggtctgctattgaccgctcgcacgctcggtgatctccgggaaaagcggctggcactgatgtatctggtcgataccgacaaaggccctctggtttaccggcttaccgccgatggtaggccctcggcagcgatatccagcacgataaccaaagaggtgtaccgagccttgctggcgactccgtcggcgcctgttcactgggtgactgacggtggtacccctcaacggctgtacctttttgaatccttaggcgatgagccgggcgaggggtggctaggcctggagattctcggcgaagacctcgattcgatgttgcgccggaatgatgccggaaactacatgctgctggatcagcatgggcaggtcgtactcgctacggacgcagaggcgctggggagcggtgcgtcgcggacgcttttgcgtggagacggcttcggtttcatcggtgctggcccactgccgcagcatatggtgcttttccagcacgtggggtcttcgagctgggatctgatctatcacatcggtatcggtcgcctgttgctggctctgtggctccctctgttacttgcctctgcgttggcactcgcagtcggcatcctactgcattggctggtgcggagcatcgagcgacgcttgatagagcccgcaaagcgacgccttgaagcattgaaggagagcgaagccttttcccgtgcagttatccaggccgcgcccgtcgcgctgtgcgtgctgcgtcgtgccgacgccgcagtggtcctggaaaatccccaggcgcgccaatggctgggtgatagcgaggcgattgcccacgacgcgccgagatggatttcccaggcgttcgcaggaggtgtgaagtgttctggagaagaactggaaaccgaggcagggctacatcttcatctcaattacacgcccacccgctataacggtgaagacgtattgttctgcgccttcagtgaaatcagtgcacgcaagcggatggaggcggaactggctcgcgcaaaatccctggcggatgctgccaatgaagccaagacgctgtttctcgccaccatgagccatgaaatccgcacacctctgtacggcatgcttggcacgcttgagctgcttgggcgtaccgagctgagtcggcagcaggccggttacctaaaggcaatccagcattcctcgtcgaccctgctgcaactgatcagcgatgtgcttgacgtatccaagatagaggccggccaactggacctagagtgcgtggaattctccccgctggaattgaccgaagaggtcgtgcagtcgttcaccggtgccgcgcaggccaaggggctgcagttgtatacctgcctctctgcggagctgccgctgcgcatgcggggggccgcggcgtcgatccggcagattctcaacaacctgctgagcaacgcggtgaagttcaccgacaatggctatgtcaacgtccacctgaaggccagcgtggtcgatgccgaatgtgtgatgctgacctggcaggtcaacgataccggcatggggatcaacgtcgaggatcagccgcgtctgttcgaaccgttctaccagatacgccgctccgagcatccggtcgcaggcacgggcctcggcttgtcgatcagccagcgcctggcgcagctaatgaatggcagtctgaaactggtcagtgagctggggttgggcagcagctttagcctcaggcttccgcttgagcggatcgcgatgcaggctgagccgcaggacctagccgggtgcgccgtccaagtgctggcgcctgtccgcgacctaacggaatgcctgtgtggctggatctcccgctggggtggaagggccatggtcgcgacgccgaggtcgctggacgaggcggacgcgacctcgctgctggtcaaagtgttactgctggagggggcgccgatgttcgaagcatggccaggatgccgggtggagctttcccctcagggtgatatggagccgcaggcacagggccgcgactggctgctcgggctcaacaacctgaacggcctgcatcgtgctctgggcctggcccatgggcgtctcgctgatccttcgacgccgccgatacggctggctccgttgcgcaatctaggtctccgcgtcctagtggtggaggataacgcgatcaaccagttgatcttgagggaccagatggaagcgctgggctgcagcgtggagctgctcttcgatggtcgcgaggcgttgctgcactgccagacggcctgcttcgacgtggtgctcaccgatatcaacatgccgaacatgaacggatacgagctaaccgcggagctacggcgccaagggttccggcagccgatcatcggcgcgacggtgaacgccatgcgtgaggagcgcgagcgctgcatgtccgccgggatgaacgattgcctggtcaaaccggtggatctgaatgcccttcagaactgcttgattaatattctcaaggtggatcgatgagctggaaatcctatcgggtgctggtggtcgaagatcagccgtttcagcgcgaatacctgctcaacctgtttcgcgagcgcggcgtgcagtacctggtaggtgccggcgacggcgcggaggcgttgcgctgcctgaagcaggacaggttcgacctgatcctcagcgatctgatgatgccgggcatggatggtatccaaatgatcctgcaactgccgtatctcaagcatcgtccgaagctggcgctgatgagctcctcgtcgcagcggatgatgctcagtgccagccgggtcgcccagagtctcggcttgtcggtaatcgacctgttgcccaagccgactctgcccaaggccatcggccaacttctggaacacctggaaagatgcctcaggcagaagctggagccggaaaccgacgagactccgcatgggcgcacggcgttgctggatgccctgcataacgagcaactggtgacctggttccaggctaagaaatccctccacaccgggcgcatagtcggcgccgaggcgttgatacgctggagccacccgcagcatggcctgttgctgcccagctgtttcatgagtgatgtcgacgctaccggtctgcacgaggcgttgctctggcgcgtgctcgaacagaccctgaacgcccaggaatcgtggcgcagggcgggttacgagattccggtttcggtgaatctgccgccgcacctgctcgataaccaggaacttccggatcgactctatgagtacgtcggcgctcgcggggcttgtaccagctcactatgtttcgagttgaccgagagcagtgtcacaactctgtcaagtaactactatgcaggtgcctgtcgcttgcgcatgaaagggttcggattggcccaggacgactttggccagggttacagctcgttctataacctggtcacgacgcctttcacggagctgaagatcgaccgctccctagtccagggatgcgtagaggataacggcctcaatgcagctgtcatcagttgtattgagttgggtcaccgcctgaatctcgacgtggtggccgaaggcgtggagacctgcgaggaactgaatcttcttcgtcgtcttggctgcgaccgggcgcagggtttcctgatttctaaggcagtgtctgctcgtgagttcgagcggcagttaagggaggacggccccagcctccttgtttaacgcagtatccccattatcgcggagtcgatcgcagccaaccaccgtcagcgcaacagtgtcgctgaaggaggccgcatcccgtgaagtctgctagtgccttggagcacgacaacaaacttttgctcaaatggacaaccctctcgcagagcctgagcatcggcttgatctgtgtggtggtgctgaccgtattgctgttcagcatctgttactggtcgctggggagattgtttcaggaggaggaggacaaagtctccttccacttcacccgtatgatggatgttatacgggagcatgaggtatttcttgggcgcatcgctcgaaaaagcgacaagaccacccagaagtacgactatgacgtggtgcctttgcagcggcacttgttggcaaaggaaaacggattagcggtctatgagggacgggagttttcctttgctatgccatttctactggctaccaagcacgcgttgagcgccgattcctcgggagatccgttttcgctcggtgtattgctcgccaatttctacggaagcttctggagtgtttccgcctatcccgcgccacagttactgatctttgatctttccggcagcacccgcctggcagtgccgtcgattccctccacagcgcagcgtgacaggttgagcggaagctatccgatgatagtcgagcgcattctggcgcgcttgcgcacccggccggtgggggaggacgctcagcgtgtccattggatacgcgctgatcgctatcgcgactcggcgctggagatgttgggagtcgcccgggttgatctgccggaaacactctggtggcacgacgagccgaaccatctgatcatcgctgcgagcctgcttgatctcaggcgaatcaatgacttcgaacagttggttgagcgcccggcattcgattcgtacagcctggtatcgccggatggcgaggtattgctcggcgcggcccctgcgaccggcctgagggatggcctgaacctcacccgacagggggtcgccgttcaactgctcagccagcctgagaacggttggctcgcggtctaccgaaccgactacggcaatttctttcgccactcccggtggctggtggcaggtctgctgctgaccccggcgctgctcctggccggttggctcgggatgcgttggtacaccagcagcgtcgtcaacccggtgcatcgggcgcaccggcaactggtggagagcgacaccttcagccggacgctgatacagaccgcgccggtggctctggtggtgctgacccaggatgaccagcaactggtgacctgcaaccacttggccgcccagtggctgggcgggcccacggagatccttgggctgacttccaactggaagcttttcgatgcgcgtgggcaggtaccaggagacatctgtatccaggtcggtgggcgctatttgcagaccgccttcgcggcgacccgctatgccggcaccgaggcggtactgtgcgtattcaacgacatcacggtccactgcgaggcggagaccgcgctgtccaatgcgaagcgagcagcggatgccgccagccaggccaagaccctgttcctggcccgcatgagccatgaaatccgtactcccctgtacggtgtccttggcaccctggagttgctcgacctgaccaccctgaacgagcggcaacgcgcctacctacgcaccatccagagttcgtctgcgacgctcatgcaactgattagcgatgtgctggatgtctcgaagatcgaagcggggcagatggctctgaccctggccgccttcaatccgctggacctagtgcgggaagtgcttggcaactttgccgccagcgccatggccaaggacctgcagttctatgcctgcatcgacaccgaagtgccggcgcaactgatcggtgacgtgacgcggattcgccaggtgctcaataacttggtgaataacgcgctgaagttcaccgatatcggacgggtggtcctgcgcgtgaagttgctctcccgcaatgatggtcgagccctgttgcagtggcaggtcgccgacaccggtatcggtatcgcacacgaacagcaggagcgcttgttcgaggcgttctaccaggtttcgggagcgcaccatgccggcggcacggggctaggactgtcgatctgctggcatctggcggaaatgatgggcggtcacctgcgaatggtcagcgagacagggctcggcagcagcttcagcctggtgctcgagttgcccgaggacgaacagtccgggctggcttgccggccggggctcttgaaatccgcttgcgtccatgtgcgctcgcccgtgcgggagctagccgacagcgtaggggcgtggctgaaagcctggggctgcaaggtcagcagcggcgaggcggcgccctccgagctggagacttgtgtgcttctggagctgctgccgatggcggccgggcctgcttcttcgccctggccaggcccccgggtgcgcgcgtccatggatgcgccttgccagccggagctgcgtgaggacggctggcgtgtcggcctgcacaacctggcgggaatcggccaggccctggcgcaggctctgggtggcgatatccccgagcaaacgccggcaaatgcctgcgcccgctcggggagactcgacctggaagtgctggtcgccgaggacaacccagtcaaccaggcgctgcttcgcgagcaactggaagagctgggttgtcgcgtgagccttgccggcgatgggcggcaggccctgcagctgttcgacagtggtcgcttcgacctcctgctcagcgacgtcaacatgccgaacatgaccggctacgaactgacccaggcgctgcgcgaacgaggcgagacgctgccgatcatcggcgtgaccgccaacgccctgcgagaagagggcgagcgctgccgggcagtgggaatgaacagttggctggtgaagccgatcactctgcataccttgcatgaactgctcagtgagttcgctcgcgcaggtgtcgtgcttcccgcgcaagcgcgagacctcggcccgcccgcgcagctcgacgacggtctctcaccgcaggtgccggaacgcatgcgcgcgcttttccttgagaccatgggcaaggacctggaggccgcccggcaagcgattcgccgcaacgacccgaaggggctgcagcaggacctgcatcgcatggccggctccctggcggtgatgcgtgcgcgaacgctggtggtgatgtgtcagggcgccgaggaaggcctgctggagtcgcgccttgaatgttccgccgtggagattggcgaggtgctcgttcatatcgagcaggcgctggagtttgtgagaaagacgggctgatgcgtccggggtcaatagttggaattagaacacaagagaagcctatgagtaagctcaagatagtactggccgatgaccatccgatcgtgcgtatgggcgtatgcgacatgctcgagcgcgacggtcggttcgaggtggtgggcgaggcctccacgcccagcgaactggtcgaggtgtgccggcagagcgagccgcatatcgccattaccgactacagcatgcccggggacgagcgctacggcgatggactgaaactgatcgactacctgttgcgcaactttcctcgtactaaggtgctcatcttcaccatggtcggcaaccgcctgatcctcgacagcctctacgatcacggggtgtccggcgtggtgctgaagagcggcgaactcgacgagctgctcttggcgctcgacgtggtgaagcagaaccgcgtctaccggggcgcgaacatgctcgacccgaccagtgttctggcgaaccgcgacgaagtggaaagccgcttcgcgcgcttgtcgatgaaggagttcgaagtactccgtcacttcgtttccggcagcaacgtctgcgatatcgcacggctgctgaaacgtagcgtcaagaccgtaagcacgcagaaggtctcggcgatgcgcaagctggaagtgaacagcgaccaggccttgatgaccttctgcgtgcatgccaacttgttccattgacaagtttccaccgcggagcgttcgagacgcgccggcggatgtctcagtgaagcaggctccgtccctgctggagattgccgccgtcatcgatccagctgaagcgcacctcggcctggccgccgggcagcgcctggcggagcgccaggacgcgcctggagaaggggggcaacagttcggccgccgccaggcgggtgtggccgccaagctcggcgccggcgaggctgatgaaatagggagtagggttctccatctgtagtgtttcgccccgccgctcgaacctgagctggtgtggcgcttcttccgcacctctggccagagggcgagggcggtagatgactttcatctgggtgcgcagtgtaacggtcagccgtgactgtccttcggccagcagcccggtggcttgcggcgggatttcgtagaggttcaaccagtacagcgattcgcggtcccctggcagcgcctggccggtccgcagcaggcgcaggctgcgttgctgtccgggttcgaggcggaacaccggcggtagcggcatgatcggcgcgcgggcagactgcggtgtcgagttcggggcgccatcgtcgatccaggtctgcactatgaccggataggcattctggttgaccagcagcagcgacgtctcgcggtgcccctcggcgattattgcccgagtgcgctcggcggtgactccggctcgggcgtccagcacggccagcattgctaggccgagcagtgccccttgcagcaggatcttactggacacgaatcactacctgcgcgctggcctccacccgtcccggggtaacgctgggcatgctgccaacggtgagtttttccaggcgcgcacggaaggtctcgctgtactggctgatgcctcccgcttcgccagtcttgttcgaggcgttgccgatcactggataccagccccgtgtttcggcattgctgcccatcgcggaatcctcgcttaccagcaggttcatcgcactgccgtcgcgcagcaagcggatacccacgccttgggccataccaggctggccgtagcggtcggaaactaggtaggagagcccgccattggcgttcctcaggcccagtgcagcggacgcggcctgcgccccggctgaagccctgatacccagtgcagtaccgctggaggcggtgctgttgatcactcccgtttggcacttgaaggccacctcgaagggcatctcacggttcgcgccggcattaatctcactgagggaaatcgacgggaacacaacgtggggcgtgacgttggttacggaacaggtgggatagcgcttgagcgtcacgtcgttgtacaggccgatggcgcccggccagttgtagtgccagccgaggtagttggcgttatggctggcgccgacgttggggtaggccaggccgggacccttgatggcgatgtagccagcgggctgggtgtaggcgtacaaccgcgaggcggtagtcggcgagtagtagcggatgaactccagcggagcgcggaacagttcggcgcgtaccgcgctgaggttcttcgccttgaccagttgaaagcctcgcgagtcgatatcgagcccgccgagcagacgctcgcgccagacatcggtgaaatactgcccggtttccacgtgggttaggcgcagcagcacgttgggccaggcggtgcgataggcggactgcaggccaatcgagttgcccgcactgtcgcctcctaggtaccagccgctgtagagatcgtcggcattggtggagaacatctcgtacacatcgtcctctggagcacagcggaagaacacgcgctctgggtcgtagccggcgctgtcgccgtattggctgagcggcgccaccgagctggcgatcaagctaccgtcgggctggaagctggcgtcgctgacgttgatcacgctcggtagaccgagggaaccgttgcaggtatcgcaggctccggcccaggtgccggcagagccttcaccgggacgtatctgggtgttggaggtagtcgtggcgttgcctaccgccgtgaccttgtagcaggtcgcccagctagacgaggcgagcagcgcgaggagcagaggcaggacgcgcagggatgttttcatggtgcctccgagacgggcgtgcaggtgccctgcaggcggatcaccgcctgtccgggttcgatagcctggcgagggccagtgtcgaggtcgtaatccagcagacaggcgtcccctgggcgttcgctccattgcacgcgcaggcggcccttgtcgccctcggcgcgggcatagacctggccgccttgaccgaccatgccgatgttcacaccctggctgtcgagcacattggcccctagcggtagcgcgctgccgtcggcgagttgggcctggattagcaatgggtgaccggtcagtgtgcggaacttcacatgcacggcggcgccggcgtatggcgcgatcttgcgctcggtctccagcagctcggcctcttcgcccatgccctgcggatcgaggctgaccgggttgtagcggtagggcgagagtgatggcaccacggcgtagccattgccgttgacgcgcgcgccctgaccaccgcgtacgccagctccgctggcgcccttggcctcgaccagggcgaaagtgtcgccgacgtaggggccgagggtcaggccgccgcgatgcagcacggcggcgccgcgcaggccggtgttgagctgccggtagctgctgttctcggcatagccggcgttcagcgtcgccaccgaggtctgtttctgcagactgccgttgaaatcgctgccgtggttgtcgctgtcgcgcccggcggcaatcgcgtagctcaggctgcggtcttcgtcgagggtgccgttgaggcccgtctggtagctgctgccgcggctgtcgccggaacgccgggaggccatcgcgctgagattcggggcctggctggaggaccccagcggcatggaaagtgtcagggttaaggtgttgctacgttcgctgccgtgccgcaggttgtattgcggcggcagtgacgggtcgtagtcgtcgttcagatcgcggtaccaggtggtctgctggcgcgaataggcgaggttgtagctgagctggcgccaagtgttgctgtagccgaactgcaactgggtgtcgcggctcttgccgtcgtagtagtcgctggtggctccggacagatacaggttgccgtagccccccaggccctggttgaccagcagggtgaactggttgcgttgcttgtagctgctggagttccaggagtcgttgtgctcatcggcgtggcgcgccgaaagcgcgtcgccgaggtcgcgatagccctcggtggaatagcggtagccagccagggtgagagtggtctgggtcggctggaaggtccggctgtagttcagaccgacacgccagccctgcttgcgctggccgttctccaccgtggcatgggaaaagatgctgttgaagccgaaggctccgtagggcgtggcgagcacgcctccgccgagcagcgccagatagtcctcggccaggcgcgagccgaggttggcggttagcgagttggtcaggccgcgctgataggtgaagtcgccgaacaggtcgttgccgtcgccatactggcgcgcttggccgagggtggcgctgtagcgcgagatgcccgggcgcatggattcgggaaccgcggaaaagggcacggaaaagcgcgagacgctgccgtcggcctcaatcacttggacatccagatcgccgtcgtaggcggtgccatagaggtcgttgatgacgaagggaccgggagcgacggcggattcgtggaccttcttgccgttctggctgatgaccacccgtgcgttgctgttcgctgtaccgcgtacctgtggagcatagcggcgttgcgagtctgccagcatgcggtcgtcgctggccaggcgcacgccgcgataacccaggctgccgaacagattgccctcggtgaagctctcgcccagggtcagttcgctgcgcaggcctggcaccgcgcgctgggcataggtgcggatgctgttccagtcgctgcgggtgtttcccgcatagctggagtagctgtagttggactggtggcgcaggcgccacaggccgaaattgatgcccccgctcagccccaggtagccatagtccgagtcgccgttgccgcctactccgtcgaagctcgagcgatagaagctggcgtcgtagttgacgaagcccatgctactgccagcgtcccactcgtcgggacccacgtagccgcgtggcttgatatccagcagggcctggggcaccgagagatcgaggcgcagaagggcggtgtcgagattgaaggtcgagcctggcaggcgttcttccagccccaggcaatctccaggcgcttgcacgccggcctcagaggcggggcggacgcccagcgtccggcgcaagaagcgttcgccgaagcagggtttgacgccgccggcccgggggcggaactcgatcctggtgcgactggcgtagctgccgttgagatagacatcgacatggtaggttccggggtccacctggttggcccggttgaagcgttctagggtcccgccggcgaggcccgagcccatcaacaggctgtcgtcgaaacgatactgcgcctctccattggccaggcccgcgaaggccagcgctaggccgcccagagccagcggcagtttgccggtgcgccgtgcctcaacgtggcagaacatgctggacctccattcgcgcgccgtagtcattgatcaagagggcgttcaactggaccggtcctggggcgagcggcgaagggcgttccgccgcccactcggcctggcctttgggcgggaccatgctcgacagcagccgccagcgacgttcgccgatgctcagcatcgcgccggcgaaggaggcgtagtagccgctggggttgtccacccgcacacgccagttgccgctcgcctgcaccaggctgaagtgcaactgctcgactagctgctccgagccgccaagcagcgcggcggggcgatagaacagcttcagtcgactgcgctgcatcagcagcatctggttgcgctcggccttggccaggtcgcggggcgggatctgcagcacattgagatggaacaacgattcgcgatcctcgggcagcgggagcccggtatacaggaggcgcagggtctggccgctgccgggggctatgcgcgtcaccgctgggctgaccagaaagggcgcgtttgcagtctccggggtggaggaggggtcgtcgttgtcgatccaggcttggatcacgttggggaatgcgtcctgattgatcatctgcacggtcttttcccgggcgtcgccgggataaatcacgcgagtaccgatgatcaccacgctgctttgagccgggatggcgggtatcagcagggcgagcgccagcgtagccgcacggagcggaggcagtggaaaagtattcatctgttcaccttggcgccgtggcgctcaggaggggcctcgggtactgcggcggaacctgggagggcgccgctgggcggcgcctccgctattactcgtaacgcagggtgtaggtcaccgagccgagcaccggtcccggagtgacggtggtcgcttcggagatgtagcggacggcatagtcgtagctggtgctggtctcgcctcctgcgagcacgatgtcaccggcagccacggccgacccgccggccagattgacctcgctgccgcccggtgccgtcagtagctgcagcgctacgccggtggcgccggcggacgcggtattggtcagattgccggcgctggtcggattgaccgcctggaacatcacgctgaagtgctcctcggcatcggccgccggagcggcgcaaccggtcagttgcagggtgaagctggtttccccggcgggtttgccgactgcgccgtcaagagcgcttaccggtacggtgtcgagtatcacggtcgggtcggttcgtccgtcgacgacggcggaacaggtctggtcggtcacttctccgtggaaggtgatggtattggcagccgccgcgatacccggcaatgcgagaaatgcggcgatagtcagggcagtactttgaggtttcatttcagggttctccttgttgagttttttcctccgagcaatggtctgttaagagctatccgggcgtatttaggacgtttcttaaaggaccgaaagtgggtttctcgctctcggcaaatgtttttactgcaatggactacccctgctccaatagacatttccgggcctcatagcgaggcgctttcaaaggcctcgggactgacgccacccagatgactgtgccgccgggttcgggtgtagaagacctcgatgtagtcaaaaacatccgcccgggccatgtctcgggttttgtagatgcgtttgcggatacgctctttcttcaaactactgaagaaggattccgccacggcatatcccaacaattgccgcgccggctcatgctgggctccaggttgttggcagcacagaagcgcttccagtcgtcactaccgtgcggactcctataggtactttttgaaggtggatgctgtgatgcacaccgctacgccgagcagtgcggcgcagggcaacaggatgagcaggggattgatgttgatgggaattgccaggtagagcgtccaagggacgaccgctagcggaatgatgctgccgcgcgccttgtggtagaggtagctggactcccggccggcgccgaacttgcgcaggtcccggcgcaccaggccgtccaccaggccggtgaacgcggccatcacgaataacgggatcgtcatgaccaggatcaccaggcgcacgacgaatgtcagcaccgtgtacagcgcggccaggccgtagttctgcagcgtggagacaccctgggcggtgagatagcgaacgtccagcgggctccgtggcccggcctgcgcgatggtagtcatgttggtcatccagtcgaccatcccggtcttcacgaacaaccagtcataggccaactgggccagccaggtggcggttcgacctggctcctgcacgacgacgctgtgtagcagcccctgcgacagccaactgagttcgtactcaaacatggcctgggcatgcttccagcccgcgtcaggccagaagaaatacaggcaaacccactccacgatgattgcgccgatcagcgacccgaacatcacgccgagaaattggaagggcgtactgatgatggtgccgagaagggtcttctggctctcttgttgctgctctgctcgttgagtgacttcagccatcaggcggcatcctcaccggtgccgaggtgacggaaatcgtcgaccaggtcctggggcagaccatcctgcagggcggagtatcccggcgcctcccaccactcgctgttggcggcctggcccttgcgcataccggcagccagctcctgcaggcttttcggcatcacctcgtcgggggcgaccgccggcagcggcattcggatcttccagagattgccgccctcgagtagcgcgaacgcttgtcctttgggcagaccaatgatgtgggccggctcgagcatcggcacgctggtcatctgcacctggtcgtgcgagctggaggtgaaggctaccttcttgttgttgttgatcgcgtcgttggcgccgctcgccggcgtgctggtgtagatctggaccttggggagctgattggtaaggagttcggccgtggcggtctcgcgcacccgcagcatgaacaggttgttgaagttgccgatgatctgaccggccttcgcgcgggagccgatcttggcctcgatgtcgctcatggtctgggtgtaggccgtcacctgcacgccggcgccgcccgctttgttgaccatggggatgaactcgtcgccaatcagctcgttgaactcgtcggcatgcaggttgatgcggaccttgccgctggcgagcgagccgggcaggccgtcatcgacaccatgcttgtagatgtgacccgctaccgagaccaggtcgctgaacatggagttgcccaccgcggcggcgacctcggtatccgatagtgcgtcgaggccgacgtagaccacggcgcgtttgcggatgacctgcatccagtcgaagatcggccgcggatcgttgaggtccgcgtagttgggcgaaagaagctccgagatccgcccggtagtgagtttctccagtagcggcagcagcgaggccacgatcttgtcgaagtaggtcttgtcgtagcgcacggcgctcttcaagccttccatgaccgggtcggcgatgcgtttctgtgtcaggtactggtcgatggctacgacccgcaggggccgtcctttcatgttgaacgggatgttcttgtcgttgagcttgccctcgatctggatgatggtgtcccaggccctgggatcgtgctcgctgatgtatttctgcgcatattcgacgaacaacgcatcgatgttcacgacgtgccggaggatctgctggtagtcaggccggatacccagcgcgtgcagcgcgcgggcgatgatgttgacgaaccgccaggcgaactcgcggaacgccgcgctgttgccctcgccggagagctggccggcgacgcgggtggcgacctcggagatccgaccgaaccggccgacggcgttgtagcgtgccgacaggtcaggatgaccgaggtggaacacgtagaactcgtccaggcggccggcacgttcgcattccacgtacatacgcttcagcaggtcagcgtcgcctttcgggtcgaagacgatcaccacctcgtagtccggctgctcctctgcgcgccggcgccgatagccgtggtgaaccgtctgggtccgccggcccatcttcacccgccggcgtcgtacccggcagtgagtgcggcgaatatcctgggtgatgaacagctccgcgaggcgcgtcttacccacccgcgtggtgccgagtaccagtgtgtggccgacgcgctcgcccagttgcaggcctacgtcctgttcgcgcggctcgatgccatggagccgaggcaaaccgcccacgggcggcagcggccgtgcggggttccaggccacgtcccaggcagtggctttggcgaccagcttcagggggaagggggcgaactcgagctgcttctccaaccggcgcgcgcgctcgtagaggggcgagggctcgacgtaagaggcgaactggggcaggtaggtatctgccaggcgctgcgtatgcttctgcgtccagcgaaatcctttaccgatgaacaggtgttcgttgctgaccggcatctcggcgctggtcatcgtgtacttcggcagtcggcgaatgttccgccggtagcggagcaccacgccggcctgcttcagccgcacgatacccagccaggcgaagcacagcgcggccacgatgccgaacagcggagtgagggagaacgtccacggcgcgacgatgcagagcgcggctgcggtgaagcacacggtggtggtgtagagctccacggcaggccgcaagagcgcttccaacgggtactggccagccatggcttacaccttcaggcttgccggcgcctgcaggcggcccttggcatgaagttcgagcacctgtttcctggcttgctctacctcatgatcaggcagcatctgcaccagcagctcgcagagggtcgactcgtcctccaaggccttggacgtcacctcaccgccgtagcgtgagatcagtccgagcaactcctggtacatgagttggcgtgcctgagcgtcgctcggctgcttgatgactagggtgatcagatgagtagtcatgaggactcctactgctggatggcggtggatgtgatgagggcggggtaatgctgcagccctagccggtcgaccaggtcgtccgccggcgccggcaatatctgaagtcctttcccccaggcccggatttccgtcaggcgcgcttcgctggccacgttcactgccaggcccacggcttggaggtctcgaagctcgtcgcctcgctctttcagccaggttcgagacagcgtgtcgtcgccgaccaggaacagcagttgcaggcctggagcgttgatggcgcgcccctggacccgtcctggcgataggcgggcggagcgaactggaaacgcacctgagccacggacgcccaggtcgccaggtcctggtgcggaagcggatggctgcggatccaggccctggtagtaggggagcgccgaggcgccgccgaggtcttcgacaacgatcagcccggcggcccaggcttgagtcgcgaacgccgtgcaaaatgccagcgtggcaaggaacttcttcatggattggtcaccagtaggttgacgccgagaacttggctaaggtggcgggaaaccgtcctacggtatttggcggcaggcgcgccgccggcggggcggtggtagcggccggcaacttggatccagtccaccggtcttcccggggcggatgcatacagggcgtcccgctgctcgatcaggatgtcggaggtggcgtccaggttcttgtacggatccagggactcgcaggggctggagaaacgatgtccgttccagccgatgttgacctggccgaggccggaatcgacgctcttggccccgtagaggttgatcgccgcgagtagcgctgtgcaggcggcggtgcgggtcgcgtagtagtaagatttcccggcgacgttcaatgtccagggccagggaacgtattcgccgcgcagcaggaccttgctctcggtcagcgcgaccgagtagagcacctcggccggaacccctttgggcagggcgatttgcttgtacgccggcggtggatccacggcggcctgagcgatgttgaccaggaccagcagggtggccaactggagggctcgaactacagacgttgccatcggccgttcacctcctgtaccagggcgggaagggctccgcccagtcctagggccatccagcggccctcgtcatgattgagcgtgatctgcttgctgcgaaccttcttcgggtcgatgccggcgaggattgcccagcgccgcactcgctctgcgtcgttctggctaccgacgaagtagaggtcgaactccttttctgcatgttgcaggtcgcggacccgctggatgcaggcggtgcagttgtcctggacgaacagggccaggcgcccgctgctctgcaacgctgggctcatgttcggcgtgcccgacgggttggctgtgctgctttcggtgaggcggatcaccccctcgcctggataggcgcgggcgaaggcttcgtcgtatgcgcgctggtaggcgagttccttctcgacccggcgccgttcggcctggacctgtagatcggcataccgccgccgttcctctgccgatcgcgcctcgatgcccagcgcggtcagcggatcaataccaggcgagtaagcgccccgggggccttgcatgagcgtctggtagcgggtccattcctgttggttcagtccccactcctgggccaggtcgctctgagatgtctgttgtttcagcgtgccgagttggctaccggacagttggctgctggcctctcggcttgccgccgcctcctggccggctgcgggatagctcagcagcagcatcaggccggacaggagcgatacggttctgatcatgggcggggtcctatggttggatgcgaacgctgcgcgaggtgccggcgacgtcgaagtgcgcggtaccatcgtcaaggtcggtcagtcgccaggtcgtgccggcgacggcatctccccggcgaatgaggtagatctggctgagctgggtggatcccggaggtgcaaccgacagaaaccgttctcccccgcgatactccacgccaaggatcgagaagggcgggggctccatcggtttgggtttcggcttgggcttggcgggtatggggcgttttggcgctggcacgatcagcggcggcgccttggcctgcttttcttgaagcgtgcggacagaaccgtccagtgtctccacggttgccttgagcaccaagaggtcgccggccgaggcggtggtctgagccaggttctcgacggcatcggaggcctgcttggcgaacgcctgcgcagcgtcaattcggttggacagcgcctgctggcctgaacggaagtcctcgttgctgaccaggtgctgtccatccacggcgtcgaggcgctcgtcgactcgactcaagcgagccaggatcgcctccagcgaggccttttccgcggcactgtccacgcctgatcggagctgaacgagttggtactgctggtagctcagcaggccggccattgccgtcaaacagaggccaagaatcattgatgcaggggatgggcgtttcatgagggtcctcgcgcgaagctggggacaacctctcagacggacaacgttgatgcagtaggaaatactcggcggaaggggggaggattttttgaggggagaaattcttgcgaatcctccggcctaatgctctgtgcgaagctgacgaagctcgggggctcttcgtcgcgcatcagggctgaacgctggatagcacagcaggctgacctgcaccgaaaaaaccaagtgattggcatcgccgcgtcgctggcggatcgacgatggggcggactcgttgaggtggagtagtcagtgaggtcattcggcttaccggcagtgcaaataggatatcccgctccgtgaccgagaggatcaagcggcgcggcatgtctcagatgtctgtgcgggtgtggtggcagagagtttcccggctgatattcggaggtggggaacaatagaaccaaaaaccaacgtaagcagaaatgagtgctgcacccaacaacgccgccacaatgccactatcgatttgacgataccggtatacgtaaaagcatggagaatcagtatgttactcaccccagacgaaggttaggttgaccattgcgctgccttctgaagttatggggcatagattatggccgaagctatcagaaaggatgcaatgatgacaaaactctactttgatcttctgaactcgcctgccgaggctcattcgtcgatacaaaagtctttatctgtgcaggcaatctccacaactgtcccaatactggagtttccttcggaaaccgtatacgcctatgcatcgtacataaatgcattaagtatcggtcaacgcatagatcctgcattcacccagagcttaacgagtgccatatccaacctggcaggtcgcccgattgcagtaagcgacatttaccaaaaaattcatgaaaccacactgagaacacctgttgagatgggcgttcgtcctaatagcatcacctttgaggagtatcaggccaccataaatcagcaagccatcaacatggttcaagatatgcaggatggagacaaaggtgagaaggtggaggccctccaggccaatatgcagttcctgtatggacaggagataaatactgatttcatcgctcgtaatgaactcgctgctgggcagagagcgaaaaccgtcgcaatagttcaggggcatatcaccatcgggtacggcttcgataccttcgtgcatgaagcgtccgagctaaactctttgaatcttgttggttctacgcgacagaaggtattacctgcattgcagctatcaacgtccgacccaggcttctggagcgtctatgccttgctgggacaaagtctcacggatgacgatgggctattactctttagtgccaaagcgcgagctgttgttcaacgcatagcaagcaaccagtttgcaggtaagtggaatgggctacccccagctatcaaaacggttgcgcttgatctatattatcaatatgggcagactggtaattttccaaaatttcaacaagctataaatagccatgattggccggcagtcatccatgaacttagaaactggaatggtgtaccgaatgatcctctccagttcattacaaaacgattggaagagcgagccaagtatctggcaatatccttcaactatgagcaatgaggatatggatatgaacaacacagtgagcgaaacgcaacagatcaatatttaccaaaatccggggcagtctatttccggtctctacaaggggctggctaaccagtgctctcctggccagccatttccagaggtacagcttgtggaggcttgggatatccctctcgtactccatccggagtttgtgcctaacggagatgtctcgaaaatcgataaggagtacggaacgatccttgctgctgagtcagctcaggttatcctgcttcaactccaaatggctcaagacaaggctaaggcgtgcggggaggttacagccttgatcagttctgtctcctccaatctcaataccattaagagtcgtcatggtgctaattatctaaacctgctgaaacaatcaccgaaccgatacccgactagcgtcggagttgagatcatgtcaggtggcagtccgaaccaggattctggaatcgaggtctcttacggtgccagtctcggccgtctaactcaatcacaacttcaggcgatgaatctgcctgccagtctcaaacagttgctcactcagggaatcggtgtgaagctttctcagcctgaatattggcctgcttacaacaacatagccactggtattcgttatacaaccggagtggcgataacgttggcctattgggccacggtttagagatggttgaacattagggagaaaaggataggtgcccagatcaatctgctcgttcatttttttgctcatattcgcgcccacaatgacccaagctgcgaaaataccagcaaatgagtactcattgggggatggaagaggctacatcaatatctggccggaaaaggatgaggctcaggcatttcttatccataatgatgggcctaatggggctacatgcagccttaaaggcactcttagagataataaaggagtggtgcattcgccgtattcctctgcttcatgtttgctaagtatcacccagacagggctgctgtcagtaagcgtcaaacgtgaggaaaattcgccaagctgctctgcatggtgcggtcctagagtttggtttgaaggagcctatagcgtcccgcccaagggctgctactatatgcaaataaggaaaaaaactcgacaaatgttgggtatgattgagaaaaaagagcttgatgccgctcgcgccttatcaaataagcttttgtcagactgcgcaaccgagctagcctatcctgccaagatatacttgacgaacacacttgccatgatcagtgctgaaaagggagagaatgctcgctgtttggagtatgcccatcgggtgcaaaagcaaattcctgtaagagatgacggccaaccggctgaagacttgctcccggcggagcacgctttcgctatggaacaacgcgccaaggctgatgctctgtctgagcgatgcagcgacgagaaataatgacgcgtcgtagtaggcgcctagttcactaggagcgatcttttccgactctcccgcggcatgagtcactcgttcgtgcggaagtgctggtagagcgtttgccgactgatgttgaattcgcgggcgagctgagccttgggctcgccggccgctgcccgcagccccagggtagcacctgcttgtcggacaaggcctctttgcggccccggtacgcgcagagcttgatatcctcgcgctaccgcgctggtgctgcttgtatgctgctcagcaagccagccgccggtcttttcagggtaagcgtacggccaatacacctttacttaggttgagccgtatcagcaaaagaatcgattcatatgtgtgaggtaccgcctcatgcacattggctttggtaccgacatctactcggagaccctcgtgccttggtgaaacaccatgtgccaaccatcttcgtaggttttccaaacagagctacgcattgataacgactcatcgccattagcattttgatgacggcatcggtacgttgctaacgcgacaccatctgcaagcacacgcagtttgaaatcctcgattgtccttttgatccaagtctgggattttagtcccacgatcacctccgctttcgtccagcttttgccgatagctccaaattcaacgaagtcttcggtaagcagctgtttaagcagtcgatcattctttctcgattccggctctagcaacagctgttcaagcgctaaaatctccaggcgaatatccatttccctcacctaccaagtatgatttatatatgtttcacaggggacaatagatcacataagctagatctgtacccactgatgcggcagcaactggctgatgtctttcgaccgtaacgtcggcaggcgagttagcacgtccttcaggtaggcatacggatcatgcccgttcatgcgagcggactggatcaggctcatgatagctgctgctcgtttgccactgcgcagcgatccggcaaataaccagttcgagcgtccgagcgcccacggccgtatctggttctccacctgattgttgtcgatgggcacagccccatcgtccaggtagcgcgtcagcgctccccagcgtttcaggctgtagtcgagggctttagctgtggccgagccgttgggcaccaggtcgcgctgggccaacatccagtcatgcagtgttttgctgatcggtaccgccatttcctgacgtattcgccaacggtcttcgttgctcatgtcccgagcctggcgttcaacctcgtacaaaccgccaattgagtgcagcgcctgttcggccagttggcttttgttagcgacatgcaggtcgaagaacttgcggcgagcatgagccatgcagccgatttcagtgatgccttgttcaaaaccggccttgtatccagcgaagtcgtcgcagaccagcttgccattccagtcgcctaggaagttgcgtgcatgttctccggcacggcttgggctgaagtcgtaaaccaccgctttgagcgccgaaaacggcgtcgtgctgtaggcccagacatagacccggtgggttttcttctcgcctggtgcaagcatttgcaccggtgtttcatcggcgtggatcacgtcctggttcagcacggcttcacgcagtgcatcgaccagtggctgaagccgcacgccagtttgtccgacccactgcgccagggtcgagcgggcaattggcagcccggcgcggccaaagattttttcctgtctgtacagcggcaagtgatcggcaaacttggccaccatcacgtgggccaacaaacctgcggtcgggatgcctttatcaataacctgggctggcaccggcgcctggatcagggtttcgcactgacggcaggcccatttgcccctcacatgttgctcgacggtaaacacgcccggcgtgtaatccagcttctcgctgacgtcttcgccgatgcgttgaagttggcagccgcaggcgcattgggtattttcaggttcgtggcgaatcaccgtgcgcgggaactgcggcggcaatggcgaacgtttcggggattgccgtggctcggcttgtggcgaagctggaaggagttgtttcagctcggcctcgatagcttcaaggtcggtgtcgagcaggtcatccagcaagctgccttgcgccgaactgatttgctcgctgcgcttggcaaacttgtggcgtttgagcagagcgatttcgaacttgaactgttcgatgagggtttcattgttgcggattttcctgctcatcgcctcgacctgggattgcaactgcaacgcctgtgccgccaaggcacgaagctgttccggggtcatctggtcaaggttgggcgaggaagtcatgccgccgattgtgccagagcaggcgcgatgcgacgacaagtagaccagccaaatggccggcgtttacagcatgctgatcacaccgcctgtgccgacgcgctgccacggcaggcccagcaccaaggcctggagttgttcgctgtcgagttcgacctcgcagccatggcgaatgccgggccagtggaacttgccttggttcagtcgacgcgcggcaagccagatgcccacgccatcgtgcaccagcactttcattcggttagcccggcgattggcgaacagataagcgcagtgcggcttcgccgcaccgaacaccgcaattacccgggctaatgccgtctcggtgccggcgcgcatgtccatcggttcggtggctagccagatcgcatcgatgcggatcatcgagcgaaagcccggatgaattgcgcgcagccctcgggatctgaggctggctatttcaccgtgatcatttgcccggccatgggcagttcaatgagcactgacgtttcggctggccgtttaggggtggccttcagcgggacaaaggctggtaacgaggctggtacgggctggtctcgataaagcgtcagccatttgcggatgacattggcgttgatgccgtggctgatggcgacactggacaccgttgccccaggttgcaggcattcctgaacgacctgggctttgaacggtttcgggtaagagcttcgttggcgcatggaaatcctggcgataagggtgatcgcgtccgcttaaaaatacgcggacaccatcgcccttaatgctggagttcggaaggtgagttcgccggacgcttacttttcaggagactacgagtcatgtgccgatgcagtaattgacttgccaatgaagacagtcaagattgacgctttagtaataacggaaattatcatgacataggttctaaaagaggctccattggagcctcgtatttttgtatggtcggcgtagcacttactttagtgatacatgcttacccatgaactgtattccgttagataaggagctgactttaagtgagttcttgtagccatagaactccccaagaccatccccgtcgggaatttcagtgattccatttgcaatgaccgtatggccgcctaaacctagaagcttgggagcatagggaactgctccatctgaaacataaagggtgggtgagcgatggtctctatcttgcttccaagaaaagtacgagtgtataactcctgctagtacctcgctagccggatcattcctggagaagagtacgacatacggccgccatcgactctcatgctcacatgaaatgcctgtgtggaactgtcgattctctaatttttttatgagataaagtaaggtttcctctgagcttttttcgagaggaggtcggcgtatatcaactttagatatttcgccagaggaggatggctgcatccataagggagggtatgcgcctgaaatgagttgatagatcgctgactttatggagaggaaggggacgcaagggaagttggaggagccaaatacttgattacgagactttgcatgctcatatgcactgatctctaagtgagttgaccatcctttattacgtatttcctcttggatgtcgtttggcaataaactgacaattgactcgatccagcaacgagcctcggtactaagcgaaacgggaaggtttcggtctcgcaagtcaagaaatcgaaatttatttagagtttcttcgacttctaatttttctattgcgtcgaatatatgggttgtttggattgaggtctcttttgtttcgatgaggattagtccgggtagtttcttaaagctcatttgctcaagaaaaaggactaaggctggaagtatagagtgctttgggtttccagtaaaaacgacggggccattctcggtatattcaaggtctaaacaatatagcgcttccagtaccccctggtgtgtatcgttgcggccacggatcacccagaatggagcgcttctattcatgccaatgtgctgctccagtttatcgacatcagcgagtgagcggaagccgcgagaaactgctaccgcattttggcaaaccttgagtggatattctgttccaaacacaagaaaggagttcttctgcaagcgtttggcatcgcgtttcaacgccgagatgtttcgtgaggcggacgcagtgagactacgaataagagataaagccatgttttccccttgtgccgttcgtggcacttacggaggtaaggactggctcgctgtggcacttagtgccaattttgcgaggttcatatagtgacagtgcgtccctctcgggtttcatgcgccgcaccagcgcggccaagactgtaccccatttattagatgacgcacaaatcttgatttttttatcctgcacttcagtgcctatgtggtgagcgtagagttattttcagctgtctctggtgctgttgctaggagatgcaggtagttcagacaagatgtggagaaggactcccagaaaaaaggccacccgaaggtggcctatgagttcatgctgcgatgagttgtcgtgccaacgccatctccacagaatccccatcctggttcaacgagtcgagacctgactcgggaacgtctcccgacgtgctctgagccacagcgatcttcttggccatcagctgtaagcaggtgatctgcgagctgccggcgtagccgaagaacaccaccctcaccgggtgcttctgcccgatccgccacgaccgccgcgcggcctgctgcagggtgtacacgttgtagcccgtttgcaggaacgcgatggtcgggaagtcgagcaagtccagcccggtcttcaccagctccgggttggtgatcagcacatcgatgccgcgatcgacctggtcgaggatccaatcctcgcgtcgagcggtatcgaccgaagcacgtagcactgccaccttcagcccggattgctcgagcactttcttcagcctggacgtggtgtcgcgcgtcccgctgtagacggtgtatgccagaaccttgcggcccttcgctttctcctcgaagcagaggtccaccagcacctgctccttgggtatcaactgctcgtcaccgaagatcgctggcacgaaggccagtgtgtcccgggttcgcggatgcttgacgatctccggtcggaaacagcagtccggccaagccagcagcacgttgaggaccacgcccaggagcgtggtatctcgtcgcgccagagcctggcggagctccgctgtcagcgtggccgccaggcgctgataggccgaagcctgctcaggcgccatgggcacgtcgatgaactcctcctggtagtcgggcagtacgttgccaccaatatccttgagcttcaggaacacggtgaacggcaatacgaagcggtggatgccctttgggccgaagccgggagccttcaccgtgcgtaccgagagcttcttgccccgcgctgtcttgtgcgaatcaccgtcgcgctcggtgtagatatccttgagcacaccgtggtcgcgcatgaacgacatggctgcgggagccatgctgccgcgcgcgttgggccgatagccgtcctcgatcatgcgctgggtgaggatgcggaacaggagatagaacagatcgtcggcgtagccgcccatgagcgttccggtcagcagcacggttttccgtgccttggctgcgagaacgcccatggcctggccctgggccgagccgctgttcttgtactcatgtccctcgtccagcaccagcaggtcgaagtagccatcaggtaggtagcgcttgatgaactcggtcggttggtagccgccttcaccgaagccgaactcgatgtttgccatcgatcgctccatgcgtttggcctgccgatcgctgaagacgaagttgcccttggcgtccatcaggttgatgaactccgagacgttgtccaccaacatcgtggccaggaagtcctcgccgaagtcgttcagcaggcgctccgccctgaccgggccgatggttggtatccggcacatcgacttgagaatcgttgcgcgccggttgccgccgtcgggcttgcctggtcggatcagcgtccagagcgccccacggcaggaggaacaggtacgtcgacggtcaccacgctcgaactcctccaccgtgaccaggttgccttccaggtcctcgaggacctgtccgcaatccgggcacgcagcgagcagttggccgccggcggcgcgtttcttccagcaggcgagccgccagtggaaacccatccgcatccgcacgcggccgaggatgaagaactcctggcgcccgtcgtaggcgtcgcccatctgatctcgcagcttgagcagcttgagtagagtatctgggccattgagtacccagacgcgggcggctgggatggtctccaggatctcgcggcgccacttgtagaccaggtgcggcggagagacgaccagggtccggcgatagccggcggcgtgcatgaccgctgcgacagcgatggccatcatggttttcccggtgcccatctcggcgttgatgattccggcctgctcgttacggtccagcagcagggcggtgatggcctggacgacctcggcctgggccgcgaagggcttgcgcttgagtcggtccatcaccaactggcggtgagcgttgacggagccggtatagaccggggggttggagcgattgagcgactccaggagctcgtcgccgaactcgtcgatgaagtcggtcaggttgatgttcaggtgggaggcggcgagggcggccggttgggtcagagcgttcatgtgcatctcctgcaggtgaagaacggagcagggcgtgcacggtcccctttgggtatcggcataccctgcagggtggagtggaaggaatcgccgcgggggcgaggtcagtaatcgctagggagcaaaagcgtggttgagctgcggtctgcctcagtgatgatccagagcctggattcgtcgccggcgtcgatgtcgtaggacgacagcagccgatcgccgaacttcagggctctctggttggtgttccagtcttcctggtccagcgttccccaatctcccgccagatggcgtttcagcaaaggcgctgggttgagttgaccggtttccaccaggtggctcacggctgcggtcattacgacccggccagggctgatcagcagcggtgcgggtgcgggggccggctcaggttggggctcttcagcttcttccgtggtcgcggccgaggagctgatggtcagcacgcggccctgattgaccgaggagggtgtcatttcccatgcccggatgatcgggatgaaacggtcggtgaggatcctcacctcggtgatgttgccgtcgtcgtcctcggtgaattcggtcttgcggaccttgtccttgtaggtgtcacccttcacgaccaggatccggcccgacttcgatcgcacgacgccagatatcgcgccggcggccagggccagggccaggtgccagcgagacagctcgcggactggtgggcgcggctgcagccccgcttgcgcgaagtgcaggttgaagtcaggccagagacctcgcagccgctggatttcaccggcgaactgctccggctccagggttactcggtagaagtgctccagctcgctggtggccggcagaaccacgtagggttcccacggccaagccgctggaatttcctcggccttttcctggcccgctccgatcgcctgcaggcgagacctcacctgattggcgtccgcccgggccaggtcctgccgacggacccggatgccgaagatcaccacctgcttgaaggtaggatccgcggctgcgtagatgcgcaggccggtgaagtggttgctcaaccagccagtcagctcatcgtccaagacgtagtgaggaacaatcagaaccatgacgccgccgtactgcagcaacggcaggcagcgctggtagaacgctttctccagacgccggcggccgctgccctggtactgcgacgcaccggagtggtccgccaccaggtcgccataaggcgggttgagccagagcagtccgaacgactgcctgctgatcatggtgtcgaaaaggtcactgtgcagcactcggtcaagcaatcctcgggcatggtcggcgcgctcgcggtcgtactcgacagcgagggcttggacctgatcgcggccgagggtgtgtgctgcctcagccagggcaacaccctcaccggcgcaggggtcacagatcctcatccttcccgacggggcaagagtgagggcctgcagagcgcgttcgagggtgacctcatcggtagggaagtagccgttgcgtgcaaagttgcgcgccaagcgcgggaacatgagggccatggggcctccttgagtctgagagggatggctcaggcttgcgcctgagcatcggtggtaagaatgctttcgcggattacctcaccgagggtgggctcaagcacgtcgacccgcagggcgagtcgccaggcgcagacgttgccgatcgtcccgggtagggccgtcaacatctggtgctgggtgagaacctccatcaccggctcgcgccagtgctgcaggagggggagcggacaggtttccatcaccagcggccagagcctctggtgtggatcctcatcgcgctgcaggagtgcgaaggcgaggtgattgcctcggtcgggcgccgaggcgcgccgatcgaacagccaaagattgagcaggctgccgaacaacgtgccgcggaactgacgggtggtgcgtttctccaggagatcctggtttgggaagacaggtaagcggcggccgtccacgatgatgtggaaatggtcgatgccattttcttcccggcccagcgtcagcctggccaggaactcttgtgtcacggtgtcgcggccccaggccgaaagaaagaccaggttgcactgctcgtcgcacacgcaggcgtcgacgtacaggtctggacactcttcgatctggtagagcggggtgggactgggcataggaacctcctggaaggaggagccacgccgccctcaaggggcggtgaagcccctcggggtgtagtccaactggtgcaggggagcgtggtggctaccgaacgctcttggtgtgagggtcgaagctgagtccatcggcttggtgcagcggcccttggccgatcaggaagacctggcagaggtactgatcgcgtagcgcgacagccgcttccgcctgctccaaggtcagcgacagctcctcgatgaacaagtcgatgagctcgtcgtcgccggcgacgtcgttgttggacagttggtcctcgaggtaggcgagggtttcctgggtgaggttggtgaacaatggattcatggtgtgctcctggtggtagacgaggagcgcccttgagggagcccctcaagggaagtggttggtgcggtcaggcttggtgttcgtgcgtcaggcgtttacgccattcctggttgatctcatcgtgagccaggtccaggaactccagcggacagccgtagtagaacgggccggcgctttccggaatggtcttgtagccccattgcccggccgagcagtccagcaagtgcagctcgatcatggtgatcgagtgaccggccggcttgccgaaatagaatccggcaaggtgaaaagttcgttttacgacagtccaaagttcattgccggagactgcgtgtgccagcacctcggtgctgcctgcgaaggtactggttggggccagcagctcacgcagcaggtcttccttcgtctgatgtgagaaaagccatcccataggtgtgctcctgtggttggccaggtctccctgacgggagagcccggcagggggtggtagggtgttgcttcagcgtgttgcgcgctcaaggcgctggaggagccggtaagctgtttgcctggcctgccagtcgcagtacaaccagggctcgttgtcggccgcatgctccggcgaaggggtcttcacccgctcacgcagtgcgatgatggcctggtcgacgacggatcggtcgaacactgccgcgcggaactggtcagccagattgtccagtccgacctcgcgcagcgaggcgcaaaccagcaacaactcctcgctgaagcctggggtgttgtagatcgatttcatgcggcctccttgcgggtccacacctgttgtttgaagtcgagctcatagcccagcgcgccgagtcgcacgcactgttggcgtagtcgcttgcggtcgaccgtggtgtccagcttgacgatttcgcctagcggccagaccgtcccgaacagttctgcatccgcgtctgtgtccagagaggcggcctgctctgcaggagccggagtgtccataccgaaaggcgcgtccctggttgcagcgaggcacagaggcttcgacttctggggtgacggcgactttggtggtatcgccggtactactgtggggagctggatctcgggcacttcgtcgagcggatccacctcattgccggaaagacgctctacctcctcgtcgctgaggctgtccatatcgttcagcgtcatgctgtccactatggcgcggatctcgatgactagccgaccgccggcggagtagtggtgggggcggatattggcgatgacgaaatcaccgcggtacttgccttcggtgtgttgatccaggaaggcatccttgatgatgaactccccgatcgaagtccagagttttcccacattgaactcgccatagcgaccgttgatggttcgaatggccaactgtccgggaactgtgatcatggtatgacctgcgaaaaggatgatcccgccgaagcgggatcgtggtgaggggatgaactactcggtaaccgggtgttcggcgaggcactcttcctgcaactcgatgcgcaggtaggaaggctcatcggacggctcgactatcgagagaaccagcagcgcgagcgcgcggtcctgcccctcttcctccttgtggtacaggtggaattggatgtgcttcgcggtcggctggagagaaagctcctgccaggcggtttgaacgacactggccagccgggtgcccatctcgtcgaccctggcagggttggcgagatagaccaggcgcagccaggccgcgttggtgagaacgatcgggagtttgaggtacgcagcagtgtgacctgcgctggagtggttgttgagagaggtcatgagaggtctccgaatacgcaggcctctcccgcggggatgaagtccccgcgtgggtgggtaggatgcactccatcacttgcgtgatgcgaccgcgctgccgagtgctgtggcggtcttgggtgggttagcgcttgcgcgccggagccttaaaccctggctccttgggaggcgctgtcaacgacagcgagccaattcgaattcgggggctggcgggatttcccgccggccggattgctcaatcgtcataaagcggcaggcccttgagcgtgggcgcgaatggatcaagtaccaggagccgaatgtctgcttgtcccgcgaggtgaagcagatcgacaaggtgttcgtcgaggccgaaggcaagctgttcttgtcgaagagcggctgcggtcatctccaggatctccagacactcatccgtccaaggggtgttgtgcaagcgaaagcccacggcaccgtgctcgttacaccagaagagcgataccaacaccgagggcaagcggattggcatcttggtcgagaacctttcgtagaggctattccacgcgctgatgggtagatgtgtttttctgatctcccagcaggggttataaccgccgccgaacgaaaggtatcgaacgacactctcggcttcggtcagtgagtattgatctccgataagcttttttctgccgtcctgctcaccgtagatgctgtaaagtacgtttctcactattccttggtgagggcatttttcaactctttcatcgtctaactcttggactaccacggcgaaatcgttattgaagtagcacagctcgcactgaaaatattcgtctgggaggtgctgctgggtttcatgcagagcgcggtagcacggtagattgttgccttcgtcagtgatctgcaggtttcgctcgatgcggaaactctcatagccgcgaataaacgggttgagttgagtcatgggatatctccggttgccgggaagcccatgcccttggaggctatggacctccaggtgagtaaggggcgccgaagcgcccaggtgatgtcgagttgttgcagttaacgcgataggtgttcttctttacgccgagccttctggtatcgctctaccaggccatagtattgaagtaccggtgatgtgcttgagtcgcaaccatgctcacagtcggcctgcgccaaagcttcgattgcatcttgaattacatagagctcgatactgagtccggcatcgccaaattcatcaacccggcctttgcactggatgtactcgaacctgctttgtgcagcatgcactccaatgttgagtagagctgggagcctttctggatatgtgttcatggtgagttccaattcgtaatcaaatcggagaggtcacctcccagcaggggtgatgaccccgtctgggttgaattagaagatgcacatgggcaaaagggtaaagcttaatattccagttgcgtccaagtgccgtggtctaatgcctgttgggcaagttcgcgtgaggggtaatattcaaccgactcgcgcgaggctggtccttcttcgtcagaagtgccgatgtagtaagcacggttcttattcataagtacctgcaacggcagttccaggctgagatgggcgagcgccagctttccgtattgcatggtgattctcctttcggtaggaaacaccagtcccatggggactgaggtcccctaaatgggaaatgtttggcgattatgccagggcagatacctgggcattgttgttggccaggaacagccaggcgaagttgcagaactgactgctgagcagcagctcgtcctcgacgtcgctgaggctaacctcctcaacttccggcagggcgggcagttctacgatttggatgttgctcatgatgatctccagataatggagaacaccacgccctggggggagatggtgccccccggatgggtatgcgatgaagagtggcgcatagcgtaggtagtgaaaggccctcgggatgagggccggtattcaatcaagccgtgttcaagcagcggcttgttcagcgtgctcagcgggggctgcgggctcaccttgaggttcgcctttgccttgctgggctttttcagcttcttccttcgcatcgtagacggtggtgccatccactttgatccaggagatgaagagcagccggcctttgaggcttgcgtcgggcttgccttgtttctcgcctttctggtggatgaagggatccgcccagatatcgccgatacggaaggaaatcagaaccttcttcttggcctcgactgcttccttgcaacggcggacaagcttttcagcctgggcgccgaccactttgcagtcgatgtaggagtattccacgctgtctgccgcgccatggagggctgcgacggttacggcgaggaatggttcacctcggcggatcggtacctcgcggatgcgattgaggtagccgataccggtggtgtgcaggtcgaaatacttggcttcttgggcttgggtgttgttgctcatgatgattctccagtttcgtaagcgaaagcggagaaacaccttgcccgtcagggaaaagtattccccgcatgggtcggtattgggaggtaaatcagagggagagggcttccatcaacctgtgggttgattgatcgcgctaccggaagctggtgcgatcttgggttcgatctacacggaagtccgtgtcgtagtctttcagatcatgactactgggggagggttgccgacaacgtcagcagctcacgtggtaaaggatgggcaggggaaaaatgaatgtcaatacccatgaaatgaaaaaagcgcccagggttgggcgctttcatggtcaatgatgacggggaagaatccgatgtttttggcaccaggtcttgacctgaggccaactgaaccagagggctatgccggagcagataaccaccaggctggtcatgatgatcatgccgaactcggtctgggacatttcactcctcctcggtgagagcgatacctatgagccagattaccatacccatgacgaaagcatatgccgtcagcaagcggtgctcgctgaggaagatgcccaccaggctcgccgcaacggcagtggtaccgatttttcggagatcgtctgcgaatgcagaacgtttcgatttcatggttttcctcgaaaaatgccggaaaaccaccctgcgggatggttcccggcagggttgggggtggtagcagtggctattagcggccgagagcagctacttgttcatccgtcatggtggacaagtagtcctgccagcgttgttggtattgctcctgagtacgccgatggagttcccaagagactgcgctaccaggaggtgctggcaaaagagcaatctcatgatcgttcagggactctaactggagagggggcctccccatttcgctttcggagttgggtgcaatcaaatggtcgagggaacccatcttgagctccttcctgactggcgtttcagctttggcggtcgccttggccggcttgggtttgcgtgcgcgcttgggcttttgcacctcgcgcgtattggctagataccagtcattcaggttgaccttcttcagccggacgatggctgggatgtcgctgatgtgttctagctcgccagcggtcgggccggccaggaaggcaggatcgatgcgctggactctcaacgcaaccggcgcttgtgcttgcactacgaccggagggcgactgagcgctctgcggaactcacgcacaacactgccgagggcaaagccgatttcgaagctggtggattgcttggacatggtgtttctcctgcaggttgagggtgcggagaaaacactggccctggcggggaagtggattccccgctgggttgcggaagggagcttctatcgaccgaggccgaccgaccgcgctaccagaagctatgcggtcttgggttggatcaacacggtgggctgtgctgcagcatttcggatccgagctgcatgggggcatgtcgctgacaacgtcagcagatcacgcgttcatcatcgaagcggggggcgaaagtgtcaaggtcaagcaggagggggagcggatgcagcgggcggagagcgagggcggaagagcgcggctggtagaaaccctgtcaaaggtttccccagccgtgtctggaaggggagtcaagtgagccacctgtggttgaatcgtcgatccctgggcattgatcgtctcgatcccatcacccggccattatcgtggcttggccagcaaacagtaggcacgcatccgcgtacaaagggagccctgcgtatcaccggcgggccaccggcagggagaaggatcccgatgggtagcctgatagtcctggagcaggagcatcaggctacccatggagaggggaaaaggaggggccgtaacaccagtacgacccttaaatcgaggaaacaccgaacctcttgagaaccctatgtgcctttaaactcgctcgacacgagttgacggctgcatgacaagcaaaagaacagggagacacagggagaattctcaaccagatccgcacgccccacccggtgttgtagcgtgcttacggtttggcgatgaggcgaacctgcatcaccagggcgctactgatgaccgtcagtagccagcggggtgaaatcaaagttgatggcattatgtgttcagaaggccggtttatcaagctgcgccggggtttactggcctgtggaggttatttgaccgcgaccaccgcgccctcggggatgggcgtagggagcgcaatgacagtggctccgaggcggcgcgtgactaactggccgttgcgcctgacgccaaccaggtcggattccgtaccagcatccacggccgccgccagccccgccggcggcgaggcgatgaaggcgtagctggtgccggcggcgatgtagccctgaagccgcgctggcttgcggaaccaggccggtaaaccaagagcggagtccgccggcgaaccggtgaaaccggggttggcgtgtgcgtactccgccagactggaccggaagagcagcaagctcctggccagggtgtcgacctcggccagttcggcgctcgaggtcgcgtggtcgctttgtacactcagccaggtcccggtgatgagcgcgagcaccaggacgatccacatcagcggcatacggtagtccttgagtcgtggcgacctgctagttcacgcaggtaacggtcacgttggtcgagtcgggggtcttgtagggttccgggtagttgaagcctgggccgatctcagtgattagcccgaacgagtagttggtgccaaatgtctggttgaagcccactgcgcagaatcggccgccgcaggtgatcgcgtagcggacgtagtcgtagttcaccatggcgctatcctgaccatgcaacgtacaccagtccttgatcacgccggccgtggtgttcaggcgcatggaggcggcggttcgtccccatttcccgttttggcaggacagccagagtccggtgctggtgatgcctgccagcccgttcggcgagcagttggctccttcggtggccacgcctttgagctgtaggtactcgccgacttccgtccggccctcggcggtgagtttgcccgctttcatctcgccgccggtgtagacgttcttgttcatccaggagcgcacccaggtgctgtcgctcatgtaccagccgccgccccatttctcgttgtaccagcccgtgtcaccacgggtcctgaaccagcctccggtgtacgtctcgccggcgacgtcagcagtgccggctttcaccgtaccagtggctgtcacgttgcgcgcgctgatgtccgcgctggtggtgatgttgccgctggccgtgatcgccccggctgcggcgatattgttgcctcccatgtccagcgtggtattcatccggttgagttcaggatgacccgggacggcattgcggtagaggtactcgttggcgatggcgccgtcctggaagaacagcgccgtcgccagatgtccagcgccgggagcgctaccgaaattgcttaaggccacctgccaggcggcgccctgggcgatactggtgttggttttcgagatgtagcccccggtggctcccatgagctgcgcgatccggcggatcgagagttcggaagctacctgtccacccgtggtcacgatcagcgtttcgagctggttggccgccggcttgcgggccaggacctggtattgctggccgtagatgttggtgtcgcggaagcctgcgggcaggtaacgggtgttgcgcagcatcgggacggtgatcaccgccggggccgtggcgccggcgctggccagaaccgtgctgaagttgtccttcaggtacttctccgctgccttggccacctgctgttgctgctgggccgcgtgctgctcgtccaagccgtccaggtagctcatcaggaccgatatgccaccggcggtcgcgatggcgatcacgacgagggcgatcatcagttcgatcgagatgaatccactgctgcgcgtactcctcatggtgttatctccataggctttgccgggactggcgagcttggtcgtcctgcagcagatgagcctcctttcggcggatcttgtcgcgcatggacgggccgtcgtcgccagtgaacagcagtggctcggcggtcaggcggcgcgaggaaccatcgctctccagcgcttggcagatcacagcttggatgccttcggcaaccacgtcgtaggcgtttctcgccagtggctgggcgagcgtcaccaagcgctcgatcgcctgatgacagcttttcgcgtgaatggtggcgatcaccaggctgccggtcagagaggccttgcaggcctggtaggcggtgtcctcgtcgcggatctcgccaatcagcaccaggtcggcgccggcccgcagcgtgcgcagcagggcctcgctgtatccgcctgagcgccgtgaggttctgacctggatgcagcggccgagcccatgctgaccgctgaggttggtttcctgcgggtcctcgacggcgcagcccaccccgcccaactcctgcaggcgggccaggagcagagaggcggcggagctggtcttgcctgtcgccatctcgccgcagaacaggaccaggccctgcaactgcggatccatcagtgcggaaaccacttcgctcggatagccgatctcttggaactcccgcaattgggcgctcgaccggcgcagcacgaagacgctgccactgaaagcgtcttcgaggagggtgacgcgaagcagaacgccgtcgacgacgatggcgaactcagggtcctgcagctcctccagcgtttgcctgcagatctggagcagttcctggacgtgcgactcccactcgcgaggcacttcgactcggcgcgcgccggcgccggccaggcctttcacgtcggcgaagccttcaccgaggtagaggtcgacgaactgagcctggatgatcgggttcacactcacgaactataggtccaggtaatgctgttgctgtcgctgctgcaggcctgggtcgcggctgcggtggtcacttctccggtgatcgaggatccgctgttgattttggtctgctcgaaggtgttcttcgcgatcttggtggccagcgtgatacaggcgtcctggggcaacttgctggtggtgatcgagaagcccatgccggtggacgagacagtgaccgatccgccgtagacgttgtagacgacgccggaggagacactcatgttcttcggcacgccgttgattgcgatcaggctggggatcaggttggtaccgctggagccgtagcccgaagaggtcttcagggcgcgtgcgttggccgcaatgacgctgatgttgcgttgttcctcgttggcgttggacgaactgaacattccagccgctgcggccaggcccaggccgaccccgatggcgatgatgatcagcacgatgatcatctcgatggaaacgaaaccgccctgcgtcggacgggaagtgcgttgcgtagtgctcatggagcgctccttggtgaggtttcagtggttcatggattggatgagctgctgtgcctggtaggcgccgagcaggaccaggatcatcagcgcgccgatgaagatcagggcgaagttcttcaccagcccggcggccagctcgatctgcttgaggctggtctcctgccagcggcggctgaacttgaccagcgcctcggagaagcctccccggttggcgaggatgcacaggtactggatggcctgccggtcggggaaatcgtgaccggcgctgcgaagggcaacacccaagttctggcccaggcccacgccgtagcgggcagcttccaagcgctgcttcagccagggcggggagatcttgatcatgctggccaggctgtcgtaggggcgtatgccggcgttgagcatgaccgccatgttcagcaggaaggtggtgccctggagcatgcggtagatggaccagggcggcagcgtccggtccagccagacccggcctttccagcggtaggtcggcaacgtgacgatgaccaccaccgtgagggtgatgacggcgaccagaacgtagataccaggtcctgtgacgaagctggcaatggcgttgagcgtggcgagcgggccggtccaggtgactgggtcggagagcctggccaggctggggaccatgcgataggccacgatgcacagcaggaacaccatcatggcggacagcgccgaggggtagagcagcgcctgccagatggtggcgcggatcctggcctgggcctcgaccagggagacggcatcgcccatggcctgaaccaggttgccgctcatctcgccggcctcgatcaacgctcgctcctgggcggggagatagagcgccatggcggtggccagacgcttgccgttggacagccccatcagcgcttcgcgactggcgatggccaccggatgaaacggatgctgcccctcatgagcgaagatcttgtgcacctctgccacagcatccttcaacgggaccccgttttcgagcagggtggacatgctttcgtagaactgcaggcgttccttgcggccgaactgcttgctgtagaaggcgaactgcaactgctcccagaagccccccatcagcacgcctcctgcgagtagaagctgtcgtcgagcagatgctcatcgaagtcgagtggcccaatgaaatcctcgaccatctgcgggtcgaacatgccctcgttgatgcggcggatggcgtgggcgtgcttggtgatgccctgcatggtcttgacccagtagttgcgtgcctcggctgggccgcctttggcgaacacacgcatgaaggcgagggtgggcagaaccacctcggcgacgatcgagcggccgttgaccccggagccacggcaggcctggcagccaggccccttgacgtgaacctgggaaacatcggtcaagcgtcggacccgttcgaccaagtcgggcgcgagttggtcttggtggtcttggaagcgcactttgcagtgggggcagagcttgggcagcaggctctggttgatcaggccggtcagcagggccggatcgaacagcaagccggggtcgacgcccaggtccttcaggcgctggacaatgccgatcgcgctgttggtgtgcagggtcgaccataggccgtgcccggtcatcgcaccacggaacgcggcgacagcggcgaagaggtcgcgtacttcgccgatcatcatgtagtccggatccaggcgcatgccgttggcgatgcccgcggcccaggcctggcgttctgcgtctgggtcggtggcgtcgtagaccagtggggtctggttgatgccttcgccgcgaatgcggtattccggcggatcctcgatggtcaggatgtgcttggatccgccatggagcttgtcgaggccttccagggtgaccttcaaggtcatcgactttcctgacccggtggggccggacaggatgttgatgccgtagggcatacgcatcatgcgatcgaacagtgcgttctgctcgggcaggtagccgagctgctccaggctgtcgaggccggtgtcgtcgtagagcagtcgcaggatcatcaggaaccccccggcacgcgggcgggtggcgatccgggcactgaacaggttgagcttctcgacgaaggtctggctcatccgcgcgtcctggtccagttgcggcttgaacagtggctcggccacgtcgcacatggattggtagatggttgcacagagttcgtgcagctcctggctgcggaactgctcgacggtcttcagcaggccgtcgacgcggaaacggatcttgctgccggtgccggcgggactcacgacgaaatgcacgtcactggcgcgcagctcagtggccttacgaatgatcttgaccacgcgctcctgcatctgggtggcgcgctggccatcgctatcgaccaggccgtccatggcgacggcgcggtaaagctggtgaatggtctgcaggtcggtgaggttgagctggtatcggaagccacggcgatcgagacggtcgatgaacgacagaacgtgtatgtcgttctggtggctctccgatagatagagcgtgccgtcggcagccagagccatgatttcctgcaggtgcttcgatacctcccattcaccaccgtcggcggtgagcagttgggtcaccatggagggctgcgcaagcgcggcaatctgaaggttcgtcatggaggtgcctactgaatgaacggctgcggtacagccccgggcagcgccggcggaaccgaggcgccttgggccgtagaggaggcttgggtgggggcaacgctggagaagcccacgggcacgcggttgccgtccttgtcggtgagcacgacctggtccagcgagattgactcgacgcggtatttgccaggcagctccgcgccgctggcggcgtcaacctcgtacccgcccgggaacaagaacgtggcagtcatcttgccgccggcgccgtagatggtccgcaccactggcggaaccggctgcgtgatcgtcggcggcgccgccggcaccggcatggcgaacgtctgcccctgggcgctgacgacctggccggtttcgcctttgccttccaattgccgctgcgccgtggccaggcgcaccttggcctcggtgaggatggcctgggcctggatctccgcaagttcgccaacggtgccagcgcaggcctggccagacgcgaggaggaagagcacggccacggccatgccgatcggctcagttcgcatagatttctcctgtgacagtccagtccaactggctgtccttgagcgtggtttcgaggttggtgatgcggacaccggcagcgggcagcccctggaaggtcaggtctgccgggagccgggtctgggcgctgaaggtgaatttcttccaggaaggcaacaccacttgctgttcagtcgcagcttccgcgccagggaggggcggagttgtctcctggctgatcgacagcttgggctcgaccccttgacggtacaggtggctcgtcagcgcctgcagaacgtcgtccgccggcagtagcggctcatcactgccgatggcaaccttcagatcgaccttcagggccgcggtgttgccgttgtcgatgacgaaggcggggcggtcggcgaacaggtgctggctggccgctgtcaggtcggctgctgtgctgttgccggtacggtggtaggtggcgaccaggaccctgccgtcgcacttgctggattcgaagagccagccctggatcgacagcgacagtacccccgttgccttgctacaggcgcgtagcatgtcctcgaggtcaggtatgagcgtccaaggcttctgcaatgacgccaggtccagcggctgcttggcctgggcgttcttctcggccagctcggcgaggcgcctctgctcctcgaggagcgcggcttgcctggcgagctcttcctggtgggcattccataggtagtaggcggttagcgacccacctaccacgcaaccgagcagggccactgccgtccactccctggcggacaagccgaaggtgagttgccggaggcggtagtcgcgccgcaggcgcttcggcgcgagcagttcctcgatgtcgaagtccttgacggggaaatcgaacccttcgggaacgaagacctgtgcgtttcgcagcacgccgcgcgtagagagcttcctgacccggtcccgggcctcgtcgagggtggtgaccagatcctgcccggggacaatcgcgccatcgagcgtggcgaccagcgcgtagcggtcctcgtcgactttccagcaggccaggaagtcgccgtcgaactggcctgaaagcgccgaggccagggagtacatccccttgactgcgccttgcgacttcgaaacgaagccggcctggatcaccgtcggtgaatggcggatggcaacgatgtccagatgctcttccttgcccagcttgcgcgcttccttcatgtactgccgctggctggacagcggccgccagaacaggccgctgacgaacttgttgccgtggtagctcaggatcgagacgtctggtccacggctgccgaggtcaggcttctccatggttcagcccagcacgacgggggtgatcagcaccacgatgacctcgcgcttggtattgcgggtcagcccgccgccaagaccgaagaacccagcgtcgccggtgccgaccttgttggtgtcctcggtggtctggtcgaagccggagagtaccaaggtctcgccgctgcgcagacgtaccttctggtcgaacagttgtatgtcgtagctcgggaactgggctttggagtccccgctggtctgcatttcgaacgtcggccgggaggtcatgttgatgttgatcttcagcagcatctcgccgctttccatcacgaacggcagcaggctcatgttgtagccgctggtcacggcgcccgggatcagcgaggtggtactgccgacctgggcgacgttggagatctggctggaggccaggtagctgtcgtagcggccgatctggatcggcgccgactggaggttgagcgtggtcacggacggggatcggacggtcgagacgcggccctgctgggccagcgcctggaccatggccttggatcctgcccaggcgctgttggcggtatccaggatgctcacggagccggagatcgcgctttgatcgatgcccggcatggtgttcttcaggccgatgccccacttgttgttgagcgacttgtagaccaggttccagtcgatccccagttgatccttgtcggtcagggcgaccgagagcacgttgacgttcagcagcacctgcttggtgatgctctcgttctctcggttgaccaactgctggacacggttgaggacttctggacggtcggtgacggtcagggtgcccgtggcacgcgacagcgacatgcgtcccatgctcggcgtcagcatcgagttgatgctgttctcgatgtcgctgaggatcgatgtcttcagctccgagctggtggtctgcttgctgccggagtcgccgctgatgccggagctgccattctgtccggtggatccggagccgtccccgctgatgccggcggccgtcgtcataccggaacgcacggtggagtccaccgtgttgacgtcgtcgaaggcgtacatgcggaaggtccgagtgtccaggtagtagaactcgacccttttctcggttgggttgtagcgccaggacacgccggctcgggcggcgatgagatcgaggaacccgctgactttgccgttccatttgatgttgtacagagaccgcggaccgtaggacccgaagctcgaccccatgctgccgccggcaccgagcgacatgccgttggcgacggaggcaggaaacagcatggtggccatgtcctggccgccttggatgggcggcggggcgttgctcgcgcgctgctgaggttgcacggcgaaggcggccgggttcagcgcgtcgggcgtgatactgaccgccatgtggcattggttgatgacttcctgggcggcctcctgcagcgacgctgcgcctgcagggcgccacgtcacgatgcagtcactggacaaggtgtgcgaaacgcttaggggtttcgtgctgacccagggtttgtcggagaacaccaccgtatcgcgccgatccggtcgggtgttgcgcacctgcgctgcgatcgtagacgcggaatctgccgtagcttcgcacacgatccgccgactcgttcacccgcgtgaccgagcaactggccagcgcggggatcaggaggcaagccaaggaggttcttcaggggggcacgcatcagttcttgcgctccttgatgatgatcagggactgcgggcggctggcgttcaccaggaagggccgttcggcagcgtcatacagggggaacagctcggataccgcgtcctcgaaggagccgtggaaggtcagtggagcctcgatcggatagttgagatcctgcggctcccagcggacggtccagcgtgcgcgctttgcccaagcttccaaggtgtcgcgcagggttgatcccgtctcggctgaccaggcctgtgccagcggccggctcggttccggcggcgtgagcaccttgaccggtggggcggaagccacggtgggtggagtgggcggcgtggacttcacggcggaggccgcaggcttggtcggtgccgaagccgcgggaggagaagaggggtggccatccttggccggtgcggctggggggagcacagtggtggattcaggcttcttggccggagcgtggctggttgtgatcggcgccggtgtcggcaccgaggcgaccacgatgggcgactccagcgtgctgactttctccgtggaggagggttgcgctaccgccggcggagttggggcagcgggcttcgcatacagttgctggaccggtttcggcctcggcgccgggggaagttgatagcccgggcgcagcacgaagcagacctgccgcgcgacctcgtcgaccttaacctgccaggctgggccggagaggacctggagggtgttgcgcagggtcatcgggccgagcttgtactgagctgccggcagcggccgggtgtagaggatgttcacatgaccggcgtctgccgggcacagcgagtaacccgagcggctcatcacgtactgcatggcgtccttgacgctcgggttcatgctcgacgggatggttacgtcgatgatctgggccatcaggtcgcgttgaccggcatcaggctgggtgctgaccagggtgtagcgcccatagcgcactacgggctctttctccggctgcacaccgtttggatacaggtccggagaaagcaggtctggattgcggctgctgtcgaaggctggcctggccggctcagccttgtgggtcgtgcagctggcgagcagcaggcacagcgtgagagtggtcaactgcctggtcattgaggccccctttgatgatggggcacacagtggcaggccatccgccacgcatcagcaggaaatactcggcaacaggggaggggatttctcgatgactaggcagagggtgagcgaggcaggcgtaagggaaacggattaggagcgatgaaggtttttcatgttacgcctaaagcgagccaggtgggaatcgttgttagaaatggataaaatagaagttctaatcgttttagaatgctttgttgaactcaggtcagacagtacggggtgctaattgagctttaaatactattgggctaaatttttctggggagctttcttctttgttttagtcgcttggaaaggctccgtatttccaagcctggcatcagttaaccccttggtagtggctggattcagtactatcctgtttcctttctcggtaaggcttgttgaagacttcgctttaaaatatacggaaaaagagttctgggtcacaggttttttctccgaaacccctgcaaaaacaggattgtatgcagtcttttatttggcttgttatttgttttcaattcccttggggatgatttttttattctataaatacggaaaggcctcgtaggatttaacgaggccttgcttggttttaaatggacattacaaggttgtttgctttttctagaaggccttcgtcaatcatcgccccggtaactgccattaccagtgcgaaccccaggatgcctataggagtggccgttgccgtggcaaatgcaatacccacaagccaactggcggccgcaccagcagctagtgtttcaacttttacaaagaatggtttccagtccccggtttccgtagatatcttgaactcttggtacaggctggcggcgtcaatagctttgcctacaactccaaagcctttgctaaatttctcaaggctcttcgccatcatctgcttgtctagagaatcaaaggctttggcaatggcttgcctatctttaaggctaagttttttatttaacgcatccttgtgtttttcaaacgaattgattgcttccgccgaactcctgatatttttccccctggcgccttcggccagttggtgcgccatctctgatgttcgtgcgccaaatttctcagttacttccttataaaagtcggcagtaaatttaacagcatcttgcaacgcttgttcctcggccgccttgcgttctgcttctgtcctgcgtcgtgtcgtttcggcgttcagcttatctaagcgggtctgtagactggctatctcatccacaagtagctcaccattgtagatggctttctgcttttctagaggggttggggcattcttgataagagtattgtttgtggtctgcagctgctttttatcagcaattgcttgcgtaaccagtcttgtggcacgttcaagccattgctctggcgttggactgaccaatggaggcaaagcacttcccgcttgatcaagctcggattgtactttcatctcgagattcgcctttctggttttgtagtcccgctccagttgagagaggtcctctttttcctttagcgctttttgcttgttgagctcctgtcttagcacttttaccgcttcagagagtgaatcttgtttgtagtaggcaaccgcccgctccagttcatctctaacaagctgctgaaaagggtacttctttctttcttcccaagagttcttctcccagatcttgacccaggcctcatagatggagaggcttgactgcttttcgtagtcaatgaatgggcctttggtaaaggtctttttgtatccttcaagatcagattccatcttgtgcaggactgccgacatgacatcgactcgctcttgccttgtggcctccctttttccttgagtgatctgctttagcaagccatcgacttgatcagatactttcttgttgatctccttcttttcttttgttccttgttcaacaatggatcggactggataataaatgtttttctgtagatatatgtctctttgaatcaagtcgccaaacatattcccggcaacggccgcgctatcgatagggggaacctcgtatgcgtattgatcgtctggaccttgtgcgacaataaccatggaaccaggtacttcgttgtcattggacatttagacttctccattggtgagtgtggtacagaaacagtgccgattcagctctagaaattgaaccccatggcttcaatgtgtgggcaatgcactaagaaggcacgtcaatgcgctgtgatatagtggtaataagcacggttgcttaaactcgatattcaggaatgggattggctgagcccacgggatattccctaagagtcatgtatctctaataacgagttcatgcgctcaagattcacgctgggtatgtgatgctctctgcaaaattcagctacttgatccgcaacaccattcaagggtgaagatagggatagcaagcgaagagacagttttgtgcgttccatgttaaacgggagatacacgtcgaagacctaagccattaaaacgtgctgaccatccagttggggcccattaggatctagcacagcacccatggtgcactggggctatttctcggatgtacaccgttttggtacaggtccggagagagcaggtctggattgcggctgctgtcgaaggctggcctggccggctcggccttgtgggtcgtgcagctggcgagcagcaggcacagcgtgagagtggtcaactgcctggtcattgaggccccctttgatgataggcacacagtggcaggccattcgccatgcttcagcaggaaatactcggcggaggatcagggcttttttatccagttaggcttgcggctaaaagcgcgcggtttccgtcgacctgctcgggctcgatgaggtcctgggcaacctggcgtttcgcgttgagcagttgccacagttgctcgtcgatcgtggcctcgaccagtgggattttcaccacgaccatgcggagctggccgtttcggtacgcgcggtcttcggcttgttcctgctgaccgggagtccagggcaggccgaggaaaaacacgtagttcgccgcagtgaggttgttgcccgtccctgcggccgccgtagtgcagatgaacactcggcagtcgggatcctgctggaagcgatctatcgccttctgccgcttggtgagcgagtcattgcccaccagcgtgacgcagccgtgtccggcctgctcgcagagttccttcagcgcagccacggtcggcttgaactcgcagaacaggatcaccttgtcctctgcgtcgagctcgctcaacaggtccatcgccacgcgaactttcaccgtttccaggtaacgccgcagcgcgccgagtcgcgcgaagaccggtcggtcctcgaggcgcagcacgtcgtattgctggcgttcctcggtggagagggccaccttcagcaactgccgctgcttgcccttgaggctgggcagcacatctttgcgcctgcgcagcatccagtcacccagctccgcccgcagactctggcggaactccgggttgccggcgaaacggtcgcagaactctttcagcggcagttggccgatggggtggcctgagaggcgcagcagggtgtgcagctctgtctcgcggttgagcaccggcgtgccggtaagcaggtagcggttcggcacttgggcggcaatgtcgaaaccgtgccgcgtgcattgcgccgtcggttccttcatccgctgcgcctcgtcgatgaccatcacggcgaagcgcgaagcgttggcgacgaaggggctcaactgctcgtagttgacgaggatccactgcgcctctggggtgtcctgctggatggccacggtggccgagggatagacctcctggatctcccgctgccaattgatcagcagggtagccagggtgatgaccaggattggtctgcccgccgcgcggatcgaagcggcgatgaccgcctggcgggtcttgcccaatcccatgtcgtcggccaataaggcgctggttctctgcagcagatgagcgatgccgtcaggctggtgggccagtagagagtagccctgaagcgccgcctcgatatcagccgagctgtactcggtgcgctcgatctccggcaccgcggcgaggtagatgtcagaggctgactcgtcctccagggatggcgctgccggttcctgctgtggaccgccgatgctcatgctgggcagctcggtcgacggcgcgaagctgccgtcgctgagcagctcctggacagtatccagaatctcgaattgttcctcggcgaggccaagctccagaatcaggttgcttcggagcagctcgggagtggtgtcgatgcgccaggaactcgatgggcgcaggaataccccgcgcatccgccgagccaccgccacaacaccaggatggaactcgcctgacagtaggacgccgccctcggccaggggcgcgatgcgcagcagcatcccccaggtgaaggcctgtcggtcaagcgaggcctgcgcggattcgaccaaggagctgaactcccgccaggactgggagtgaaggcctccagctagctcggcgagacggttgtacagagtgtccagttcaggcagcagcttgcctttggggacccgccagtagcggtgcaacggatgctcccgggcgctgatgaagaagccggacagctccagcagcgcgcgattgctgcctgcgatgtaggggatcttcaagccgaagtcgtagccgtcgaagatagcccgctgcagaagcgtcgaaggtgtcgcggaggtacgattaaccaggcgtggacggttcatcggtcttccaactgagtgagcagccacttcgccgtggcttcggcgaggcccgccttccagcgaccattggcgaagcgcgtcatgtggacggtcatgtcgggccagttcaggttcgtcgctatggctccagagcgaattcgttccatgaaccagcggtatgcctggccggcaggcgagtcggtcggcacgggggcattatcgaattcgcgcagttgcaccgtggaaaggtgcttgggactccagggcctacctataggctcgccatgctcacgcctgagctccaattcggcagaggccagcggacgaccagcctcacgtactgagagcagtcggcagtctcctcggtaggcggcctggtcgtagctatcgatgcaatgtgccagagcgatatgttcggcatataggtcggcaggacagcggagctcgacgatctgcagtccattagggcaatcgataagaccgacagacagcattccctcccaggtggtgtactcgtcggtgtcgaccagatcgggcaggctgctctgcactgcggcacgcagctccctctggacctggtggtagtcgtccaccaggttgccagcttgtcggtaggtacaatgacccagatacgctttcagggcgctgcgcgcctgccgaacaacctgtgagttcccctggtcgagggcggtatagaactccttgatgtctctcagccgtgcagtgattgcaagccatgccggatcctgccaatccgacgggcagccgttgaagagacggttgtagtcgggcttggcgttgtgaacttgccaagggatcgcattgtaggcggcatagaatgctgtccattgagcgcgagtgatcggccgccggttacctagcgatgccgccagtaggagagcatgccatcccgaatgtcggccttcccgtttgcgatggaagagagctcctcccgcacggccgggactgacgtgactaagaaatcgaatcgaggcccgcggcgcctgaaatagccaggcgaaaaagttgatgaccgaaattccttcgtccgcgacctgcccaagaatacggcccatatcgaggtacaagtcgcatggcatggcggcggcctgcggtcgttcactgtcaagctggggaaaggggcaaggaaggtaatggcggatgctctcgccgttgtcgttggtcgtcgtgtgaggccagactccctcctcgcaatccaccagtagcggcgtcaagaccggctgagccttcagcatttgcagccggcgcacctggtcgccttgagccagccagttgtagagctggggcgagaggcaccgaaccgagcggatggcgaacagcaggtcttggtccaggacctgtctgaaggttcgcaagaccgctccgatctgcttcaagtagaactggtgccttggcgcgtagtagcgcttgttgctgtggctcggatacacgaggcgatgttgaagtccgagatcgtccctggccatctgtgtggctaggtcgtgcgctcgctttgtgtatgagctgagtacagcaactgcgtcgtcgaacttttgaaggcgctgtagcagcttcaaggcccctgctcgagacggcgtgcttgccgggatacgatgggcaggcttgcactcccacgcaccaattagttgaccgtcgaatacctggagtagcggccctgcacgcatgatggtgtaacgcacaccgttgtcagcagcgactgtgatgcaccagcacctggtcgtagatgtgctgcgcaggtagtgacggatgaacttggttcgagctgtccctgcgagggagaaatgtgttgcccaggtgttggcgacggcgagctgccgctcgctgtagcgggccagggatggatcctgtagcggcccgctagggggggcgttgtcgagaggtgccacgcgcatgctcctgtgtaagcaagcagcactttggccggtcggtttacgctgaatccatgtgaaatggtcatctcaagcgtgttggatttcaaggttctacaagctagctgactgaaggtcttattgggatggatcagtaaattctcttgtagtcagcctcaaagtctcctagtgcagcaaactcgtcaaggatagctttacttaaaagaataagatgtattgtcctcgctgggttgtcccagttggcaccaccatgcttgcctccgtgaaatagattgtttcgcacggtcttaagtaagcgagcgactctagctaagtcgcttttgtcctcatctaatttaaccggacgccaacccagctctctaccgggcaggactatttgttgctctggactctgctcgattagtgctgtggctgattgggaaagagagtatttgtcagaatggttttgtacaaaattttcccatcccggctctgccctagctccaggtttgtaattttttaagtagccattctctttgaggctgaactcaaatcgcgagaaccaatagaaaaaatcaaaagctcgctctgtgatttcggcagatatattctcttttcgcataaaccctccttgatagctagcagcgaattgggcctgtaccattttgcctgcactgcgtgactaactatagtggctatagcccgcgcgggttgtcgaagtcaggccggccgctcttggtggggtagctaaccttgcaccctgttgttcgatagccgctgcaaccccagaagtcgaagccgcctttgccggctttcttgcggtgaaccaggggcagaccgcacttgccgcaaaggaagtcgctggtcggcgccgaggagatactggcggtggagcttgcgcgtggttcgtcctgtgcgctggggagcgcgcggagtgtctgcagctctgtctgtagtagctggtagaactgctggaccacgttcatgtaggtgtcctcgctgttggcgatccggtccaaggcgacctcgaggttgcgggtgaagtcgaggctgaggaagctgaagttgtgctccaggagcgcgatggtggcctctcccagctcgccggggatcaggcttcgccccttcatctgcacctggcccttgtcgatgatgttcttcacgatcgaggcgtaggaggatggccgaccaatcccgcggcgcttcatctcgcccaccaggctggcgtcggtgaatcgcttgggaggggtggttttcttctccaggacctcgccgctgtagaccttgagtatctggcgtggctccagcgccgggatcgggatggggtttgaaggcgtttcgttcttctgctcctcggcgtcatcaccctgcagcagttttctccagccaggcacgttcaacagcttccctttggcgccgaagcgcagcggctttttgtcggggccgacgcccaggagggtgatggttctcactgcgtacacggcagcttcgatctgactggcaagcgcgcggactcgaatgagctggtacagcgcctgctcatcagcagtttcaccggcggcagcggccatccagtcggtaggggtgatggcggggtggccttcctgggcgtcttggtccgctttgaacatccgctgttgctcaacacacttcagccccaaggctttggcgacagcacggatatccggcatcgagtccttcgagatattggggttgtccgtccggtggtaggtgatgagcccctgttcatacagccgctgggcgaccttcatcgtcttgtcgggtgaccacttcagcgcattcccggcggccatctggagcgaggaggagatgaacggtgccggaggcgcatcggtttcttcgctatcaatgcaggtctcgacgatgacattacgtatagcccccaccagttctgcgagttgacgatcctggacatacgggaactcctcgctggcaaacacgggcactggatcccattccgccgtccaggtacggccgtcgctgggcgaaacgaaggtcagttccaccccgaagtgcttgattgctgtgaaggcgcggatctcccgctctcgcaggaccaccaggtacaccgcgacggactgcacgcgcccggcggtggtcggcctacccatcacgcgccgcaactctggcgtgaccagataccccaccaggcgatcgatgacgcgacggcattcctgcgaggcgaccttcgggaggtccaggcgacgcggcgagctgagttcggcggtgatgcatgactttgtgatttctttgaaggcaacgcgcttgtagttcttgatcccggcagcttggaggatgtgccagccaatgctttcgccttcgcgatccgggtccgatgcgacgtagatttccacggctttctgccgcagctccttcagccgtgcgacggttttttccttgcccgagaggatctggtagtgcggtttgaaatcctggcccacgccgacggtgagcatctgcggatcctgcccgtgaacgggtaggtctctgatgtggccggctgtcgcctcgacctgccaggtcacgtcgggacgaatcgaggggagaagggacctcagctttttcagcttgcccggggcttcaatgattacgatgtgcatcggcggaatctctcggaacagtcggtcgaactgtcgcgatcagagagcgggccaacaatgcgaaatagacggtgcgttgttgcagttttcggggcaactttccgcgcatcggcgaaaaaatatccgttgccgatcaaatcggacacaacttaccgattcctcaaatgcggtaatcttgtccgtgtggctgctgcaaccatctacggtaatcgtggcaactgggtcgtcgctcgcatagattcagacaaggaaatgatcgttcctggaaggacatcaatcgaccccaatcatcccgattggtcgtaggaaggaaaatggtatggatcaaagcctttgcacatgcatgccaacgccaatcgtcaaccccaaggagctgcgactgtgccacatgttagtcggtagaactttcccgataacattgatcgcaggcgaccattggttgagctatgacggcagcgcctggtgggtcgatgcggatgagcccgcgacggaggacgaggtggcggctctgttggtcaaggctggtggtgtcactacgtgctggtgcggataggaaagcgcatcaggtacacccaagcccctcctaactcgtggggccaaggccgtaggtgagccacgacttactttgcccacaatgcgaaatggacggtgcgctgttgcagtcttcgggaggagctgaagggtaaagtcatcagaagtcgagctgctgttgctgctcctgggcaaaccctttcaaccaggacgcccgcatcgcaggatgactgtaggggcagtcgaacacccgtagccctttccgcgcggcctcagcaccaatagcccgtacagtccggtggggatcgttgaagtgtcgtctgtccagcttgtcggtatcggtcgctctctttgacacactgcacctcgtactggtcgagatttccgattcggaagcccttgccaccagagacttcacgaacgggcggccaaaattaaggatgctggtctatcagcttttgccgccataactgttcattgcggttgctccagtcgctggaatgcttgtcgaggctgcgggcggcgaagagaggttcttgccacctgcaacttcacgagtgggcgcgaaaaattaagaccggcgtttcaccgtcgcgtcggcaatgccttgggccatcctgatgaaggatgcgcgatcttcttcctccataagcgccatgcactctagaactgatatctcgtcggcgctgaggagctgcctggtcaacggctcatcgcgatcccgaaatgagcaatgtgagcctgcttggtcatctttgctgttcatggcggagtttcctgcggggggctttgtcgaagctgcgggtggcaaaaagtggtacttgccacccgcagcttcacgaatgggcggccaaaaattaagccgcctgctacatggggatgtcgtcgtcgaaggcgctgtcgtagtcctgctgcgattgcgcatcttgctgagcaggttgctgcgggacgttccgagactgttgatgctgggttggcaacagggtgacctcggccaggcgatgcggaaggatggaaatgcgcgaggcttcgaccttcagcgcctggacttcttcgcctgactctttgtccggccagcggtccataatggccctgccttcgaccttgacgcgcatacctttcgtgaacagttcggcgaagcgctgggcatcctgatgccaccattcgacgctgcaccagaagccgccgcgatccttgtagccaccttggccatcgggaatcgagttgtcgaacatcacgttcagtcgcagcaactgccgcgggggattgttgccgttggggaagctgcggtgctccggcgccgagccaatgttggcttcccagaagacgggggtagccatgatgaatctccagtcagtggtggttggtgctctgctgcagtcggcccatgaactcggcctcggcctggcccatcttttccgcgcactcggcggcctgcttgccgatggagtggatcaggctgatctgcatgttgagggtgatgcgctgcagctccatctcgtagaggtcttgcagcaggtattccggggtcttgtcctggcgcagcatttccgtccacaccccgacgcccatccgccgggatgcaatgtgctgccagcggagaaaggttgtgcgggcggatgtgcgctgctcgatgagtcgggtgggcagtagagtgaagggtgggcgacgaacctgggccagcagtccctgggcaagttcaagcaatccctgctccatggcttcgcactgttccgccaactgggccagctccctattacctttaaaaggctttaaaaggccttttagtgaggcactgtgttgcagcgcctggaaggcagtttgttgcagtgggcggaaggcactttgttccagagcgccttgctggtccttatcgagctgccgcattccgatcagtcctcgagttcgacacggtcagcgtcatcatcggcatcaccgtcagagcggccccgggtgatcggcggagcgaagttcgagcgtcgagtgccctccaggatgtcctgcgggatctcgccgaacttctcgtacatcttccgcgcggcttcggcgcgagcattgtttgcggcgaagtcgtcgcgagtggcgcccgagaactggtagctctgggccagaccaaacaggcttcgcagcaccgacgcaccttcgtcgagccagacctccatgtcgcggcgaccgaccagcccgacgtgctgggccagcaggattcgacgggcgagttcgtcgtagttggtcaggagatagactgccttgaagccgagagggttggagatgaacaacgggaccttgaccggtgtaacggacaggttctcggagatatcgagggtcgcgggcagcttggccatgacgtcatccagtcgctggtcgatggcctcgagtgcggcttggcagctctcgactttctcttcgatctgaaccagccaccagtcggagtacggatcgtcctgtgctgccccgcggtgcatgcgattcacgtatgcgcagaagccggagaggccgaggatgctgtgcttggcatccgacttctgccggccggtccagatgcgggcggcgtgataggtgtgaagcgtcagagcgacatcgctgcggagagagccgatctgaagccgatgggtttcagccatggtgctgtgttcctttatagggaagggggtcggccacatcgtgctgatcggggtaggagcgcgcagtaggaaatacatggttcgccgctggggaatttcccatggcgactcggagcaaggcacccagttcgccgccggcgtcgaagtcagttcctaatggagtggttccagtggaaccacccaactcgccgtcggcgccgaagtcagttcctggtggagtggttccagtggaaacactcatcttgccgttggcgccgacttgggtatctctaccgttggtaatctggttggcagttcatgtagttggctttgttgcataaagctccccacatcgctttttccgccatttcaaagcgatacatctcaaccgtaatggtcaacacggttactgaatacccgaacacgatcagcattaacaacagcctgagttctcggtcgttccacgcatctgtaaaaagtgcagaaagaacgagaacgaccaaaaagaaaggggccatgctcaagaacattgtttgagttcctcgtgagtggtgatgcctcgctttggcgaagtgtttcggcccgaaacacccatcttgccgccgataccgaagtggatccctggcagagtgattccagtggaatcacccagctcgccggcggcgcggaggtcggctcctggtggagtgattccagtggaatcacccagctcgccggcggcgcggaggtcaggacctgggagagtgatgcgggccgcatcaccaaaaaacacgacgcccgaccgagactttctcatgaatcatcaccccgctcggatggcacgctcgatccgtgcctgggccgaatgaggtccttgagccggctgaggacctcgctccctgtccgggtatccccccggggctggacctgaggctgtgtaggcgctatggggcttgatggtgccggagcacgaatggggcgttccgttgcggggatggttcgctcagccggttcttccggagcccaagaagcgttgaacttgccctggactgcacgctggatgagcgtcatgaggtagccgaacggattgctgactgttccgccggcacaacggtgctgccactgctcgatgatgggtagccgaagatcctcggacacccgtctgagcgcgcttactgcctggatccgttgctcggcctccagtgcgtgcaggagatcctgccagttcggatgggcttcctcgcgtgctcgcggttgtactggctttttacatacagaatcttgtttgtatgtatacgtactatatgagttcggcatccgaaccaagggcgtactcggcggattctgtcggggttcggtatccgaactcagcggtagagcgcattgcttgccgctgatttcactgagttcggcatccgaactcggggtggaatgaggtaaatccgacagagttcggatgccgaactctgccgctggatccgcttcgagctgactatcgatagcccattgctggtggttcaagcgtccctcgagcttctccagatgggtagggaggcggcgacccacgtccggatcatccctgaactcccgccagatgatctgcccgatttcgcgtatggctcggttgccgtgaccggtggattggctcagcaactgcatgtagtcggtgtccagctccaaggcttcggctggagagacaggctcgtcgtgaaggatgtaaacgttgccctggacctgtccgttgaggtcgttgcgcaggcgtcggccgaggctgagccagcgggtcagacgaaggaccgtgagtgccttggcgatggtttcgcgcgaggcgatcttgcccggctgcataccgagataggggcgcagttgctcgtatgtcgggaacgcggtcagtccgtcgtcgttgatgagcaagcggaaaacttgccagcagttccgctccagcggagtaagacgcttatccaggaggaggcgccgtggaacggtttcatgaggattgccgctgaaaatgatgccggaatattgttgagccagcggttcgccgctttcggcagcaagccgcttcttatacaaatgggcctcgagatgccccgaggccgagtccagcagtgtcgaaatgggaaagcgcgacagcctcatggtgctgtgtcgccttccgactgaaccaggttcagtagttgttgacgttctgtctcagcgttcacctgcgttgttgcggatggggcagagtggggcaggtgtgagctgacgctagcgaggtaaagagtggattgggacttttgcaggcccgcctggctctggctcgatttgccagacggatagagcccgtctttcaaccagctctggatgagagaccaaacaatggcgaggctgatgaattctggactgtcttgttcgattccggcgttgatttcctctgtgaggatcatcgcgatgtccagcaactccatgctgtcttcaaggcggacctgattttcctgcatcaggtgctcccagcggaaccatatctggcgctcgatctgttcatcgagctgccgccagcgaccgcggcgcgggtggatctccagcatcaagcgcttggtggcggtgtcctccggcgacagaccgaaaaagctctggatcatcgttgtggtggctcccagcttcagtgcgcgttcgatctgcaggtcttcctgcgcgctgcgctcggctgtggccaggattttctccatgacgtcgatgttcactctgacatctacccaggaaaccggggtattggtcaggatgctcatgacggcaggctgttggagctgagccagaatctccggccgcagccccatctcggcacaacgcctgagctggccgttgcgcaggtggttgagcacctgcgtcaggaccgcttcattgatcgtcgacttcgacatgtcgatccctccccaaatcgtgcgaaatcactggtcagtagctgcttgctcggaggcggccggcggcagctcaaggtcaaccaggcgtcgggcaagacgaatgatccggaacagtttcaccagggcttcgtcattgagacggcctgcctggcaggatggcttgtcacttgtggtgggttggcccagcagcaactgagcgaggccagctgagaactggaattcacccagtgcatcgcggcaggtctgttgatcgtgagtgttcagaacgacttggacctgcccgctgaccgcttgaagcagcgtcatgaggtgcagcgctgaatcagtaatctcatggtcttcattgggctcgcgatacgtgtaacccacaccgccctgaatcctgacgatctcgcctggggcgccgacatgcagagcgatctcttcagccagatcagcgatgtgctgtcgcaggatctcgggggtatcgatcgaccgctcgatgtaccagagatcggtgatcgggtgcaggccaccgacttgcactgggattgcctgcagagctgtttcatcgaagacaggtagatgttccccctcgaggccggccagccgttggcgagtctgctggatcttagtcgataccgggctcacgatatggcctgccaagaccgccgcacgctcctcatcgggcaattgcttttgttggacaggtggtggcggagccggcggggggaggggattacccgggttgctccttgtcctggacgtttggggatctgcggcggggctctgtgtttgtgcttgtccagtagacgacgcagcagggttttcctgcccaattggtgggagttgaggtggtgcggcaggtgtgggcaggtcgaccagagtgccgcggcgttgctcctgctgcccgttggtaatctcgagcaggatttggtcataacgcaggcccagggggcgcttcatttggtcgatgagttcgtcctggaaacgctcgaaaatgaattcgtcagggctactgtcgaagattgccagggtgtcctggaacagcatttcgaagtcaaccccttcaccagcgtatagacgtgcccagcaggaggatgccgactttctgagtgacaggagtttctcgatttgcggtttaccgagccctgaatacagcatcacaggaatcgccggcgccaatacctcaatagtgtctaacatcttactgatatgggattgagatacagggtagccgtccgcttttagccgacgtgccaactcgcgctgggaaatgctttcaccgccgttctcttgttcgtaaagaaatttcgccttctgcaccccaaccgcgcgctcgatgaacttgaggtcgcccttcagatcgttctcggccaaatgaccggtcagcgcgatgatttcgccgcgctgcttgtcccagggcttgaacaggcagtcgaagctgaaatagcgctcgtctccggtctctttgtagaggtcgttgagaatttccaggcgagtgtttccgccgttgcgaatgcggtatttgtcctctccagggcgtcgagtcactggtggcggcgtatcgaggcctcgatgtcggatcgattctttcagctcatcgtatttcgggtttcgagtggtccgggggttatcgtgccaggggaggacgtcgtggagtgtcagcctcatgggcgtgtcgctgatcgggtccgacaactgctccagaaccttgggcggtgcggtaaaaccaggggcaagtagccggtctttcagatcttgcgggttgatcttggccatactcatgcctccgccacctgaggcgtgttcgccgccgccagctcagcctgcaggcgctggttcttggcgaagagttcgtcgaccattcggtttgctcgcgcgagttcttcttcgagcgcgttgctgcgctccagtcggtagacgatctcgctgttggccgaacggtggttatccgcggctttttgctttagctgatcgcgcaagcccaagggcatacggacaacgaacttatcttcggtttctcgggccatggtcattctccaatttgggccttgcgccgcttgagctggtcgcggagttgagtggggaggctgctgatctgcagcgtgtcgcgctcctcgtcgtactcgatcctggagcccagcaggtgcgcctcgaagctgatcgacaggccttcggcgcggccggtgaagcggcggaactggttgagggtgcgcttgtccgccgggatttccggcgacaggccgtagtccttgttacggatgtagtcgtagaacgcccgcggttgctggtcgtccatcagttccgaaagcgcgtcgagggtcatcggctcgccgatgcgcgcctgcgaggtggcgtagtcgaccagcgtctcggtcttctcgcgggcctgttcctcggccatgtcctcgctttccacgaaatcgctgaaggctttcagcagggtgcgcgtctcgctcggcgaatccaccccttcctggcagccgatgaagtcgcggaaatagtcggagaccttcctcccgcccttgcccttgatgaacgagatgtactgcttcgactgcttgttgttgcgccattcggaaatgttgatccgcgcggccaggtgcaactggccgaggtccaggtggcgcgacggggtgacctccagcgactcgttcaccgccacgccttcgctgtggtgcagcagggcgatcgccaggtagtcggtcatgccttgctggtagtgggcgaacaggacgtggccgccggtgaagagattggactcctccatcagcttttgcaggtgctcgaccgcttcgcggctgaagccgacgaagtcgcggtcgccctccaggtactcgccgagccagccgctgaacgggtaggccccggactcgccctggaagaagccccaggccttgttcttggcgttgtagctttcgttgaggtcggccagcaggttctcgatggcctgggagtcgcccagctcggcgtcgcgcgcgtggagcacggccggggtgccgtcgggcttcttctcgatcaggtggacgatggcgtgtttgataggcatcagaaagactcctggttcagggaacgctgcctgtcggctcgacggagcagggcgcgggcattgagctcgccgcgtgcgtcgcttggcgtggaagaaatgaagatcgaggcgcagccgatcttgctgagcttcaagtggccgcctgcggagcggtcgacgctccagccttctgcttgagcgaaggccaccagccggcgaacgctttcccgggcgccgcgaaggaaactacgcattcgtggtctcctcgctgttgagctgcagccaggtctccatctctgcaagggagcggggaaggctatcggtggcggcggcatccaggagacgtttcaccagcgcctgaaggctgcgacgatcgctctgccggctgcaggccaggtcgtcatgcgcggaacgcagcatgcggacctctgtgcgcagttgagtgcatacgtcgtcagttgctactggtgccgttgacgcgacaggtgaccgcgaccgtgtcctgaggcggttttcccactcttcccttgctgccgagaagcgatggccacgacctacactccaaccgctggtccagtagcgcgactttccgcagtcagggcagggctgtgcgccgctgccatccaggtgatagccgcagttcagacagatccacgaaggaccttcacgcaacttgagctcaagcatcagctcgactttctggaagtgctcgagcggccggtaggctgtgacgtcaggcatcgcgcgctacctccttgggatttctacaggacagcgcccagcggctctcgatgcgcttttcgtggtcgcctgcctgtaccggcatacgggtgatgtatgcgttgtcctcgccaaacagtcgttcggcaaggcgggaggctgccaccttgtcgctccaggtgcaggtcgcacgctgcttctgaatggtattggtccagaaaccggcgccatcgaacttgacgatgcactgataggtctgggacgccttcatgactcggcctccttgctgagtgcatcaccgacctgaacggccaccagttcgggcaactccggctcatgcccgggatagttgttggccaactgatgcaggaactcgcgcgcggcgtccttgctgcctgcaatgcggaacacggcggtgaggtgctgggagtcctgagtgccgcagcagaggtgcggcaccaggctcactttcagcgagcagctgaacaggtgtcgcgggatccataccgaccagaagtaagccgaaagcaattgccccggagcgcgcgtagtgaccaccagagtcccggcctgggtggtcgagatttcgatgtaccccagttcctccagctcacgaagctctcgctccatcgaactgggtgcgaccgtgctctcgtcccgcgaaaggcgcgagatcacttggctgagggcgtccagctcgatggggttgaccccaacgtgattggcatgaaccactgccgagtcggtgaacgcggccgaggcgtggatactcggaaagcgggcttcagtgttcatcaaagacagcctccaactgatggacgtcgtagcttccgcagcaggggcagaccaacacctcggcttctccttctggggtgttctcggcggggagaacctggcgcaccaaatggtgtgggtggtgctggtcacaattcatgcactggtgggtgaccaggggctgggaagtgttcatgcatgggctccttgccaggtccccggcgccaggtcggcaaagcgggtctggttggcgatgaaggcggtgtggacggtgccgatcggaccgttgcgatacttgccgatgatgatttcggcgatgcccttggcctcggtgttggggtggtagacctcgtcgcggtacacgaacatgatcacgtccgcgtcctgctcgattgcgccgctctctcgtaggtccgcgcagttcggtcgcttgttcgtccggttctctaggccgcgatttagctgggatagagctacgacgggacagtccatctccttggccagcgctttcagcgagcgggagatttccgagatctcggtggctcgattctccaggcctgggcaactcatcagttgcaggtagtcgaccaatatcagcgcggggtgtccgtacttcctggccgcccggcgaaccttggcgcgcagctctgtcggcgtgaggttgccctgatcgttgatgaccagccggctgccatagtcgtttatgcgctggatcgcgccagacagtctgggccaatcctcttcttgcagttggcccttcatcagcttgcccaggtccaggtggccgaacagggcggcaagcctgaacagcaactgctctgccggcatctccatgctgtacacctgaacagacttctgttggtcgctctggagcgcggtgtcgaccaggttgagggcaaacgacgttttgcccatcgcggggcgggcaccgacgatgatgagatccgacttctgtagtccgccggtgagtgcgtcgagatccttcaggccagtcgggacccccgttaccgtcacgttgttgttgaagcggtaatcgatggtgtcgacgatcttcgtgagactcttgttgatatcgacgaaatcggcgttgtggtggtcctggccaagggccgaacagcttctgctcaatctcctcctgaacctcagagggatttgcctggtggttcgaggcggtcctggtgcagtggtgcccgagagacatcagctgccgcaggtgtgcccgatcgcgaacgatctgcgcgtaagcctcgatattggccacggagggcgtgttgtcggcgagctggccgaggtaggccagcccgccagcttctggaaggtcttcgatcgcttccgacacagtcacgacatcaaacggagcatccttcgcggccaactcgctgatggcggtgaagatcagccgatgctcatgccggaagaagtcctccttctgcaactgatcgccgacaatgtcccatgccgcgttgtccagcatcaggccgccgagtaccccttgctccgcctcgacggagtgcggcggcgtaagttccagaacactcacttcgagtcctcccggctgatctgcagaaacgtgcttcctctgccgcccggggagccgatgatctccagcgctttcacttccaccttggcggactcgatgatcaccgaaccgacatgagccaccgctttcgcgcgctcgatatccaggggcttgtcttcgtcaagcaacccttcgatggtggcaaagaggtgattccgcagatcctcaatcttgttcttcatgctcgacctcctgaatggtgcgtttgagcttgctgatgacgcggattgcgctcttcagctcaggtggatagcgatggatggagttgcggcgcatgcgttcggcccgggtgatgagctccaggttgtcgatgacgacgttctgcttgttgttgtccttgaagcagacgcaatggccggttgggatggggccgaagtgttcttcccagagcaggatgtggatgcccttccagtcccgggggggatagccggtatccgagatctttcgttgcaggtagccatcagcgctgacccgcgtgctgccgactgggagccatgtgtggggcttttgccccttcttgaactgcgtttctggtgcgcgtcctcgcgcgggcagccccttcatgccgcagttccatggggtgtttcccttcttgaaccgagttgcgctgccccagtcctgccggatcttcttggagaactcagggctttttttcagcccgagccgatacgctctggagcagatctgctggagcgttttgttcaacctggctgccaggacctcgttcggcatatccggatacaggcgcagcagcaccagttcctgttcggcggtccaggtttcgcggatgcagcgctcctctcggttgctgaatttgcggcgggcacgcaccagggcctcgtaggcgatggtcgagagagcagagcgagtcattgggaacctccctgctcgagcgcgccctgaactcgccggctgacaccgcggtgcaggcgagtgtttttgccgtgctcccagcctgcttgcagcgaggcctggtcataggcaagggccttcgtaagcgccgccggctccaggtacttcaacgccggatggtgtagttcgaggtaggccttgatggctgcttgagtcgactcgtccggcctgccagcaaattcacgtaccagcgaacgcactgcgagaagccagccttcgacgaagagcttgctgcgacgacgcttggtcgacagcttgcagcgcttctgttgggcgacatgagccgagcgcgctgccaccagttggtggtggagcgtagagtaggcgtgagcggccagctcagggccgatccctcggcccatgaacttgaacgtccagcccgctggcatcgcgtatgccgccaggtagtcgcagccgaaggaactggcgcagatcccggccagttcatgcagccatggggcaggagagcgcctggttcgagtgggaacgcacgcggtttccaccgtgtgggccgagatctccgcatcgctgaggtcgaactgccgcttcaggatcgcggcctggcgcaatgcggtttccgcctcgttcggcgtggcccccttggcattcgccagggccatcagcttctcgaccttggcgaggactttttgcttgtccattacgcgccccccttgcagatggttgagccctgctcggtggcggagcggtccaggcgctcgatctcggccagcactagggcgccggcgcgtaccaggttctcgcgcgccgacttaggcttccaccactcttcgtcccagggccagaacagtgcagagccattccgaatgccgcccggccagtcggtgccgatgccgccggcatggagcgcgtagcagccggccgccagggcgatcaggccagcgctagcgtcgtcgttgctggtatcgaaaccttcgacggtgatctggcgccggcgctcggcctgtacatcgagccaggcctgcggaacaggggagaggttcgaagttgggtaaattcggtctgtggcctgtcttacccgatcgacaatagccagggctgctacgtcgcccagtgcgacctccagggcggcgagcaggttggccatcaagaactgctcacgctcgtccgcgtggttttttgcgcttgggcgtctattccagtcgatctgtgctgaatacctcgctgttaccgggtctggctcgcagtaggacggcccgatgtgaacctggcagtccaggcattcaatggcacagttccaggcatcggtgtcgagcagctcgggttccagcattcgaatgttcgtgctgccgcagagcgggcagggcttgagcttggggtcactcatggcctgcctccctgcccgtcgtcggtgctgggcttagcttgggaggagccggcgacgagcaggtcggccaggtccggatagttcggatgggtccagaagccgaactgatcgcgctcgaccaggtgggcctgaatcataggtttcatgccaggcctcccacgctcatgccgagcaccgcatttgcctcggcggccagttgctggccttcagtgcttgatgagctgccgacgaagagcatcagccgttcgatgaccctcacagtgtcctgcgagggttgggcgaactcggccaggtgatcgatggcagtagctatgttccagatcgccctgttcatgtcccgctggatcacttggatcgaactggcattggccgcgatggccagttgcgatttcgtctgcaacagtaggtcgtgggcgatttggagcagtgcgttctgcagggactgtccacaggcacgctgctgagcgcgaaccggagcgaccaggccctgcaacatcgcagcaccttcagcctcgatttgcagattctcggaagcaccggcggcagcgcctgctttggccatgtagccttgcacgtaggcgtcgaactgggtctcggcgatcaagctcagtaggaggttgttgcggttctggaggttcatatgaggccctccggagccgattgcagagcgtctgtccagagccgaagggtttcctgctcctcgctggtcagagcgatctgtgcggtgcagtcagcgaccttctgcttgatgacgcgcaggcgctcctcgacttcactgccatcgtcgtacgcgatttcgttagtcagatggctaatgaagtcacatcgcaggctccccacctgactagcgaaatactcggcttcactgcgccatccgatgagctgctttggacgctccagccagcgtttgagttttgagtggagctggtgcgtggagtacaggtgatcgaacaccctggcccggttgtagatcaacgcgatctgcaggatttccagccgatcttcgagcgtatttcccggaagcgggtagttcgaggcgaccagttgcttggccaggcgctcacgtagctcgcgccgcttcttggcttttttctcgtagcgatcacgcttttccttcgcatgctcgatctgcttgttcaccgagtcgagcaagcgcgctgcgtcttgtaggagctgcttttgttcgaagctcaagtagcaacccagcttcccgaacaggtcgataccgccaccagtcagcttgcgtatttctcgcgtagcgccggtcaatttggcctgctggctccgaaggtcggcggcgctgccgaacttgttcagttccagcacaagttccgcgtcgacgtcgcgggcttgggtgataggagtcttcgccatgtcagcgccctcccttgaccagtgctgcaaccgcctcccggcgtcagcgccaggaagcggtcagtccactcgggaaagacctcgatggccaggtttcgaatgatttccagcgcgggcgctgatgtgcgattggagggttgccgcgtttcgaggcggtgcgctggtagcccgcgcgatgctgcgttgcgaaacacgacggcatccgggacagtcgtttcgagcacagaaatgtcctgatgctcatcgaagatggcacgcacattctcgtgaattgcccgggagtcattggtctggtccaggcagttgatgacgatctgaacattggggatccgcatgccgagacgctcataggggcgtaggccgtcgagcatttgcatggtgccgcggttgaactcacgggcggtaagcatgttgggttggaggggggaaacaaccaggtccgatgcaagcacaaccatttcgagcaaagctgagcgcgcaccctgggtgtcgatcagcaccaggtcgtagccttctttcagagcgggcatcaggttcgccaggcgtagccggccatcgggcgcctggagcagtaggttgttgagctgattgttctggtcgttggaaatcacgacgtccagattggggataatcgtcctggagatgatcctcgccgggtccgttatgttggcggcgagcaggtcgtaaatgccgccctgggcaacttccggcagctcgtagtacgaggatagggagggctggacggggtccagatcgatgaggagggttcgtatgcctgcatcggcgcaaaatgcaccgaggttggcggcggtggtggattttcctacaccacccttggtggatacaaccgaagtcgctttcgcattcatgtctacagcctctaatgtggggtcattagaggctgctaaacagactcgttgtaacgggagtggaaacccttcctagagaaacctacgaccagttgtcttttaaccaattggtcgtaggttcgaatcctacacgacccacca

SEQ ID NO: 3 - DNA, 1506 bp, Pseudomonas aeruginosa
gtggcgctgaccggtaatcccctcctgaaattgctggtcgtccccgtcgtgatcggcgccatcctgatcggcgtgagcatgatgggcaagaaagaaagtgcgcagtcacaaggcgccgcaaccccgacggtaacgtcggaagaagcggcaaccctgggcatcgacggcgacacgcccgccgacacactacgcaccatcgtggcggaaagccggcagctcaaggaccagatcagcaaggtgatccaggagaatgactcgctcaaagccgccaatgagaacctgcagggccgcctgcgcaacatcgatcagaacatcgagcagaagctcaacaacaccgcccaggaactgcagcaacagcaggaaaaccgtagccagacgatcctggaccaggtacagaaacggctcgagaacctaacccacattcccgaggccggtgacaccgacctgcccgtaggattcggcgtgcgaccaaaggatggccagcactttcagggagcgggctcgtcttcatcggatatcgtctggatcgagccccaggacgcccgcgcggttgatgccaatggccagccgctggccgccggctccaccacccaaccgagcggattcagcttcccgacctccttcggcaatgcggtcgatcgcggacagaacgcgctggagcggatcgatgacgggctgcaccccgtcggccaacagcgatctgacctggaaaaccgcaagctcgtccgtaagacctacacgctgccgcagaactcgacgctcatgggctcggtggccatgtttgcgctgatcggtcgtgtgccggtcgacgggacggtcaatgatccttacccgttcaaaatcctcatcggcccggacaacctcaccgccaacggcatcgagctgccggacgtcgccggcgcggtagccagcgggaccgcctcgggcgactggacactctcctgcgtgcgtgggcagatccgcagcctcacgttcgtgttcaacgacgggaccgtgcgcaccttcccggcgccggccgaggaggtgaatgacaaccagagcaacaacaaccagaccgccagcgccgaccagaaaaccatccagggcggcctcggctggatcagcgacccctacggcatcccatgcatcgccggtgatcgccgatccaatgccaaggagtacctgggcaatcagagcctactcacggctgccggggccggcattgccaagctcctggacgccgacgagaacaacaccagtaccgtcttcagcggcaacggcaccagcttcgggacgaccggaaccaacagcaactcggccctcaacagcatcctctccggcggcgtcagcgacatccggcagtggatgaacaagttgtacggggaggccttcgccgccgtctacgtgcagccaggtgcgcgggtcgcagtgcatctcgatcagcaactggcgatcgactatgaactcaagggccgcaaggtcgattacagctctggagccgctcatgcaacagcagacttggactaa

SEQ ID NO: 4 - DNA, 885 bp, Pseudomonas aeruginosa
atgatccggaagtcgacaggctcgctcttgctaatgcttgccctacccacactggcccacgcggtggagattctgcgctgggagcgcattccgttggccattccattgacggtcggccaggaacgcattgttttcgtcgacagaaacgtgcgagttggggttcctcgggatctgcagggcaagctgcgcgtccagagtaccggcggcgcactctacctgctcgccaacgagccgattcctccagcgcgcctgcgcctacaggacgcgaccaatggcgagcagatgctcatcgatatcgccgccaccgaagcaacggccgaccaacagccgcgcgagccggtcaggatcgtcgccggcgagccagtggatccgcattatggccagtcccgggaagcccagccatcggcagcagcgaaacagaccgagcacgcagaagcaccgaaggccgtgccgcgcgaaacgcccgtccccgtggttctgacgcgctatgcggcgcagatgctctatgccccgcttcgcacggtggaaccggtggatggcgtcggtcaggtgcgcgtcaagcgacagctcgacctgaccaccctgctccccagcctacccatcacggctaccgccttgggcgcctggcggctggacgactactacatcacggcggtgaagctgcagaacgccagcgcccagcacctggccctggatcccagggacctgatgggcaatttcgtcgccgcgaccttccagcacccgtacttggggccccggggcgacgcctccgacaccactaccgtgtatctggtgacgcgcggccgcggccttgccgacgcgctcctgccctcctccatcagccagatcgatcccaaaggaggccgtcgtggcgctgaccggtaa

SEQ ID NO: 5 - DNA, 660 bp, Pseudomonas aeruginosa
atgagtttcagaaaacacactgcgcaacagcaggcacacatcaacaccttccggttcatcaccggcttcctgtgcatggtcatcgttgtgctggcctactgcgtctgggaagcccgtaaggacctctggatccacattccgcccgacttgcgctcaggaagcacccggttgtggtgggacattccgccagagagcgtctatgcgttcggcctctacatcttccagcaggtgcagcgttggcccaaggacggcgaggtggactacaagggaaacctgttccgctacgctgcctacctcactccctcctgcaaagtcttcctggagaaagactttgagtttcgtcgtaacgccggcgagctcaggggtcgcgagcgcaccacctcggaaatccccggtcgaggcattggcgagagcaatggccgcgtgatccagcactcgatcaatgactggaccgtcaacttggacatggacagcacggagtattacgccggcgagaagatcaagcgggcgctggcccgctacccgttgcacgttatccgcgccgacgtcgacccggaaaccaatcccttcggcctgcagtgggactgctactccgacacgcctcaacgtatcgagcttgaggagccggccgcccccaccaagcgggagggaggtctatga

SEQ ID NO: 6 - DNA, 387 bp, Pseudomonas aeruginosa
atgcccgaagaacatctgtttcaggatggaaccctcagcttcctgccgacccgtttgaaccggcaaccggtagtcatcggcggcctgaccgcagacgaaatgtggatcacggtcttcaccagcggagcagccgggttcgttcttggcatcccggctgccttggtcgcaggtaacgctgcctgcattccactgggcgcgctgctggtcggcgccctcggcctaggtatcggcagccgcgtcctgcggcggatgaagcgggggcggcccgatacctggttctaccgccaggtggagatggccctctcgctgcgctttcccgtcttcggcaaccgtcgcctggttacgcgctccggcgcctggaccagtcgacgcacggagtccccatga

SEQ ID NO: 7 - DNA, 357 bp, Pseudomonas aeruginosa
atgctgaaactcaccctccagaaactgtccgccctctgccagagcctggccgccatcactttggcgctccccggtatcgccttggctgcactccccaaacccgaggcacctagccgtggggagggatcgggcatcatgcaaaccatccagaacttcggctatgacggagcgatgctcctcgcgctgctcatctgcgcggctgtctttctgggggtcgcttggcatacctacggcacctatcacgccatccatgacgggaagaagaagtggtcggatctcggagcgggcgtagccgtaggtgtcggcctgctgatcttgatcatttatctcgtcaccaaagccaccgccatcatgtaa

SEQ ID NO: 8 - DNA, 372 bp, Pseudomonas aeruginosa
atgagcatgagcggagcccagacatcagcgttccaggccgccgctggctttcccccatcggccggcgagggactgttcattggagcagcgatgaccttccttctgctgtggtccgcctgggcgatgtacagcacctggcgcggctgggccaccaacaaccttcgacagcgccaccggtggcgcttccgcgatcccggatcttggtcctcctcggcatcacctctttcttcctcctcagctgacccatacggagacactcatgctgaaactcaccctccagaaactgtccgccctctgccagagcctggccgccatcactttggcgctccccggtatcgccttggctgcactccccaaacccgaggcacctag

SEQ ID NO: 9 - DNA, 360 bp, Pseudomonas aeruginosa
ctgatctgcacgagattcgccgtgaacactccacatccatcccttcgccgaagctgcctggccgtcttggcctgcagtgcgctggtcgcacagggagctttcgcagcgagcgcctccgagcaggcgaacctggaggtgatgatccggcagctcaacgccctcgaggacaccgcccgccgcagtgcccagggcgccgatgagcccggacagcgcttctacttcgactacccgcgcctggccgctgacctgcagcgcatccgccaaggcctgcaggactacatgacgcccagccgcgcccaaccgcgtgacccttccgacttatcagggaattacaccctgcgcggagggccgatgccatga

SEQ ID NO: 10 - DNA, 306 bp, Pseudomonas aeruginosa
atgagcataaaacagcccttcgaataccatgtcgagaacatcgtcattccctacaaaaccctcaccaagggcgtcgcgatgttcaaacacaaagaagacaccttggaacccgacgaccacgccttgctcaaccctctgcgctgggccgaggtcgtgcgtctgggccaggaaggctgggagctggtgagcgttcagccactcatgcggggcgtaaccgagatcggtaatcaaaacgcccaaggctgggcttggggcgtcgctctgcccgtcagctacctgctgtttttcaagcgcgcaacctcataa

SEQ ID NO: 11 - DNA, 312 bp, Pseudomonas aeruginosa
atgcttagaaacatctctattggagttttgctagccatggctgctatgttgggcagttatggggtggctgccgctacattacgatgcgggtcggcaattgttagtgagggcgacttgattgatgatgtgcttagaaagtgcggcaaccctgatagccgtaaaattgaagggcccgcagtggatggtagtggctatatagtgcggggggctgctactgtcgaaaactgggtatatggaccaaggaatggatggtaccagaagcttaggtttgtcgatggaagactagttcagataaaaggcagtatggactag

SEQ ID NO: 12 - DNA, 1158 bp, Pseudomonas aeruginosa
atgaaacttatccttgatttcgacggacgccttctaaatccaagcaacatgctagaggccctatcaaaagcaggaaaaaatacaagcatcagcataagcaacgcgcaagcattaaatatagaaactcttctcaaggcaacaaccactgcagaaaacacaaaaaacctctcaacaactttcaacggcgcagagctgactgctaacaaccttcagcaagtcataaactcagcaggatcactaaccagagtatccacaatagccgcacaagccattaatataaacacacttctttccgcaatatctacagcaggcaactcaaagaattttagcgcagaattcaatggagcccaactcagcagcgacaacctacttagagcagtaaatgcggcaggaacaaacaccagcataagcgtcaataccgcacaagcggcaaatataaccgcccttcttcaaactattcatgcagcaggtgacacaaaaacattcagcgcagagttcaatggcgctcaacttacttcaaacaacattcaacaagctttagacgccgcaggaacccgaacatccattagcgtcaataccgcacaggcggttaatataagcaccctactagccctcatcaactctgccaaagacacgaaaaagtttagcgccgacttcaatggtgcacaactaacagcagacaaccttcagcaagcgatcagcgctgcggcctcgggtaccaatatcagcgtcaacaccgctcaggcggcgaatatatccacccttttacaggccatcaacatcgcgggcaacactaaaaaattcagcgccaactttaatggtgcccaactcacttcaaacaacatccagcaggcgctccgagcgacaggatcaaacacatcaatcagcatgaactccgcacaatccgccaaccaaagcactctacttgaacttctagacatagcaagttccagcaagcaattccaagccaattacaacggtggcatgtctaatccgaacaacctacaacagatagttttcccgtgcaggcgccagtacaaccgtgtttatttccgacgcacaaggcctaccaatcgcaaatatccttacccttatatcatctgccggatgagacttatagccgtggatgaaaacacaccatccacggctataccctag

SEQ ID NO: 13 - DNA, 1482 bp, Pseudomonas aeruginosa
gtgcagtggactcacgaacagtcaccgatcatccagtcgaaggcaccgaagatcctggtgcgagccttcgcaggcactggcaaaactaccaccctggtgggctttgccaggtcgaaccctaccctgagaatcctctatctctgctacaacagctcggtggagaaagccgcgaagggcaagtttccccgcaacgtagtgtgcaagaccgcccacagtctggctcatgcggtgtacggcattcagtacgcccacaagaagacgaagaacctgcgactgaccgatatcgcccgcggactcgatacccaagactgggagttggtacgtgacgtgctggccacgctgaacaactacatggccagcgccgacgcggaactcggccgaccgcacttcccgcgcttccgcgacaaggcgttcctcaccagtgctcaggaacgcttcctcaagcagggcctggacatggcgcgagtagtctggaggcgcatggtcgatctccaggacaccggcatgctgatgccccttgacggctacctgaagctgtatcaactgagcaagcccgatttgagccagcgcttcgactgcatgctcctggacgaggggcaggacatcaacccagtgatcgcggacattgcccattggcagcgcatcagaatggctatcgtcggcgatccccatcagcagctctaccggttcaggggcgcagaagatgccctgaacagcgactggatggccggcgccgaggagcactacctgacccagagctggcgattcggccccgcgatcgcacacgtggccaacatcatcctctcctacaagggcgaaacacggaaacttcaaggactgggtccgcagacgctggtgaaaaagtccctcccgccggaccttcctcaccgcactttcattcaccgcaccgttatcggcgtcatcgagaatgccctgcagctggtccgcaatcatccggagcccaaattccactgggtaggcggtatcgacagttactcgctgcgcgacctggaggatctgtacgcattcagccgaggcctgcgccaaaacgtccagaacaagaaactgctccgtgactaccgcgactacacccagtacgtggagatcgccgagatcagccaggacggtgagatgcttcgctcgatcaagatcatatcgacctaccctgatctgcctgcgcggatccttgagcttcgctcactgacccttgacgatgagctggacgcaacaatcaccctgaccaccgcacacaaggccaaggggctggaatgggatttcgtttgcctgtacgacgacttcaacgcggacccgctggcccccgacaccgacccaggcaagcgcgacgatgagttgaacctgatctacgtcgcagtgacccgcgcgatgaagatccttgccatcaacagcctggtgctgtcgatcatgcagcggtacgtggacgacagaaaactgaaggagcagatagctagctgtaaaaaatga

SEQ ID NO: 14 - DNA, 651 bp, Pseudomonas aeruginosa
atgttcgggtcgctgatcggcgcaatcatcgtggagtgggtatgcctgtatttcttctggcctgacgcgggctggaagcatgcccaggccatgtttgagtacgaactcagttggctgtcgcaggggctgctacacagcgtcgtcgtgcaggagccaggtcgaaccgccacctggctggcccagttggcctatgactggttgttcgtgaagaccgggatggtcgactggatgaccaacatgactaccatcgcgcaggcccggccacggagcccgctggacgttcgctatctcaccgcccacggtgtctccacgctgcagaactacggcctggccgcgctgtacacggtgctgacattcgtcgtgcgcctggtgatcctggtcatgacgatcccgttattcgtgatggccgcgttcaccggcctggtggacggcctggtgcgccgggacctgcgcaagttcggcgccggccgggagtccagctacctctaccacaaggcgcgcggcagcatcattccgctagcggtcgtcccttggacgctctacctggcaatccccatcagcatcaatcccctgctcatcctgttgccctgcgccgcgctgctcggcgtagcggtatgcatcacagcatccaccttcaaaaagtacctgtag

SEQ ID NO: 15 - DNA, 2796 bp, Pseudomonas aeruginosa
atgaagttgaagaatttcttacagccttttgatagcggtttctccactccgagtgctgcgctcaagctgctccgcatgctcggtggcgccttgatgttgtgcgtgctatgcagcctgatattcagtgtgagcatggttttaaaccatcaggtgtccctcagtcggcaagctatgaatgtggctatgtacgaagcgcagctttatttcgagcagcgcgaggcgttgctcaatcacttgagcggcaatgtcgtgcccttggccgcgggtagagcgctcgtcaacgaagcgccgaacaatgtgagcatcctgccgttgagtgacggagggcgaggtctgctattgaccgctcgcacgctcggtgatctccgggaaaagcggctggcactgatgtatctggtcgataccgacaaaggccctctggtttaccggcttaccgccgatggtaggccctcggcagcgatatccagcacgataaccaaagaggtgtaccgagccttgctggcgactccgtcggcgcctgttcactgggtgactgacggtggtacccctcaacggctgtacctttttgaatccttaggcgatgagccgggcgaggggtggctaggcctggagattctcggcgaagacctcgattcgatgttgcgccggaatgatgccggaaactacatgctgctggatcagcatgggcaggtcgtactcgctacggacgcagaggcgctggggagcggtgcgtcgcggacgcttttgcgtggagacggcttcggtttcatcggtgctggcccactgccgcagcatatggtgcttttccagcacgtggggtcttcgagctgggatctgatctatcacatcggtatcggtcgcctgttgctggctctgtggctccctctgttacttgcctctgcgttggcactcgcagtcggcatcctactgcattggctggtgcggagcatcgagcgacgcttgatagagcccgcaaagcgacgccttgaagcattgaaggagagcgaagccttttcccgtgcagttatccaggccgcgcccgtcgcgctgtgcgtgctgcgtcgtgccgacgccgcagtggtcctggaaaatccccaggcgcgccaatggctgggtgatagcgaggcgattgcccacgacgcgccgagatggatttcccaggcgttcgcaggaggtgtgaagtgttctggagaagaactggaaaccgaggcagggctacatcttcatctcaattacacgcccacccgctataacggtgaagacgtattgttctgcgccttcagtgaaatcagtgcacgcaagcggatggaggcggaactggctcgcgcaaaatccctggcggatgctgccaatgaagccaagacgctgtttctcgccaccatgagccatgaaatccgcacacctctgtacggcatgcttggcacgcttgagctgcttgggcgtaccgagctgagtcggcagcaggccggttacctaaaggcaatccagcattcctcgtcgaccctgctgcaactgatcagcgatgtgcttgacgtatccaagatagaggccggccaactggacctagagtgcgtggaattctccccgctggaattgaccgaagaggtcgtgcagtcgttcaccggtgccgcgcaggccaaggggctgcagttgtatacctgcctctctgcggagctgccgctgcgcatgcggggggccgcggcgtcgatccggcagattctcaacaacctgctgagcaacgcggtgaagttcaccgacaatggctatgtcaacgtccacctgaaggccagcgtggtcgatgccgaatgtgtgatgctgacctggcaggtcaacgataccggcatggggatcaacgtcgaggatcagccgcgtctgttcgaaccgttctaccagatacgccgctccgagcatccggtcgcaggcacgggcctcggcttgtcgatcagccagcgcctggcgcagctaatgaatggcagtctgaaactggtcagtgagctggggttgggcagcagctttagcctcaggcttccgcttgagcggatcgcgatgcaggctgagccgcaggacctagccgggtgcgccgtccaagtgctggcgcctgtccgcgacctaacggaatgcctgtgtggctggatctcccgctggggtggaagggccatggtcgcgacgccgaggtcgctggacgaggcggacgcgacctcgctgctggtcaaagtgttactgctggagggggcgccgatgttcgaagcatggccaggatgccgggtggagctttcccctcagggtgatatggagccgcaggcacagggccgcgactggctgctcgggctcaacaacctgaacggcctgcatcgtgctctgggcctggcccatgggcgtctcgctgatccttcgacgccgccgatacggctggctccgttgcgcaatctaggtctccgcgtcctagtggtggaggataacgcgatcaaccagttgatcttgagggaccagatggaagcgctgggctgcagcgtggagctgctcttcgatggtcgcgaggcgttgctgcactgccagacggcctgcttcgacgtggtgctcaccgatatcaacatgccgaacatgaacggatacgagctaaccgcggagctacggcgccaagggttccggcagccgatcatcggcgcgacggtgaacgccatgcgtgaggagcgcgagcgctgcatgtccgccgggatgaacgattgcctggtcaaaccggtggatctgaatgcccttcagaactgcttgattaatattctcaaggtggatcgatga

SEQ ID NO: 16 - DNA, 1200 bp, Pseudomonas aeruginosa
atgagctggaaatcctatcgggtgctggtggtcgaagatcagccgtttcagcgcgaatacctgctcaacctgtttcgcgagcgcggcgtgcagtacctggtaggtgccggcgacggcgcggaggcgttgcgctgcctgaagcaggacaggttcgacctgatcctcagcgatctgatgatgccgggcatggatggtatccaaatgatcctgcaactgccgtatctcaagcatcgtccgaagctggcgctgatgagctcctcgtcgcagcggatgatgctcagtgccagccgggtcgcccagagtctcggcttgtcggtaatcgacctgttgcccaagccgactctgcccaaggccatcggccaacttctggaacacctggaaagatgcctcaggcagaagctggagccggaaaccgacgagactccgcatgggcgcacggcgttgctggatgccctgcataacgagcaactggtgacctggttccaggctaagaaatccctccacaccgggcgcatagtcggcgccgaggcgttgatacgctggagccacccgcagcatggcctgttgctgcccagctgtttcatgagtgatgtcgacgctaccggtctgcacgaggcgttgctctggcgcgtgctcgaacagaccctgaacgcccaggaatcgtggcgcagggcgggttacgagattccggtttcggtgaatctgccgccgcacctgctcgataaccaggaacttccggatcgactctatgagtacgtcggcgctcgcggggcttgtaccagctcactatgtttcgagttgaccgagagcagtgtcacaactctgtcaagtaactactatgcaggtgcctgtcgcttgcgcatgaaagggttcggattggcccaggacgactttggccagggttacagctcgttctataacctggtcacgacgcctttcacggagctgaagatcgaccgctccctagtccagggatgcgtagaggataacggcctcaatgcagctgtcatcagttgtattgagttgggtcaccgcctgaatctcgacgtggtggccgaaggcgtggagacctgcgaggaactgaatcttcttcgtcgtcttggctgcgaccgggcgcagggtttcctgatttctaaggcagtgtctgctcgtgagttcgagcggcagttaagggaggacggccccagcctccttgtttaa

SEQ ID NO: 17 - DNA, 3255 bp, Pseudomonas aeruginosa
gtgaagtctgctagtgccttggagcacgacaacaaacttttgctcaaatggacaaccctctcgcagagcctgagcatcggcttgatctgtgtggtggtgctgaccgtattgctgttcagcatctgttactggtcgctggggagattgtttcaggaggaggaggacaaagtctccttccacttcacccgtatgatggatgttatacgggagcatgaggtatttcttgggcgcatcgctcgaaaaagcgacaagaccacccagaagtacgactatgacgtggtgcctttgcagcggcacttgttggcaaaggaaaacggattagcggtctatgagggacgggagttttcctttgctatgccatttctactggctaccaagcacgcgttgagcgccgattcctcgggagatccgttttcgctcggtgtattgctcgccaatttctacggaagcttctggagtgtttccgcctatcccgcgccacagttactgatctttgatctttccggcagcacccgcctggcagtgccgtcgattccctccacagcgcagcgtgacaggttgagcggaagctatccgatgatagtcgagcgcattctggcgcgcttgcgcacccggccggtgggggaggacgctcagcgtgtccattggatacgcgctgatcgctatcgcgactcggcgctggagatgttgggagtcgcccgggttgatctgccggaaacactctggtggcacgacgagccgaaccatctgatcatcgctgcgagcctgcttgatctcaggcgaatcaatgacttcgaacagttggttgagcgcccggcattcgattcgtacagcctggtatcgccggatggcgaggtattgctcggcgcggcccctgcgaccggcctgagggatggcctgaacctcacccgacagggggtcgccgttcaactgctcagccagcctgagaacggttggctcgcggtctaccgaaccgactacggcaatttctttcgccactcccggtggctggtggcaggtctgctgctgaccccggcgctgctcctggccggttggctcgggatgcgttggtacaccagcagcgtcgtcaacccggtgcatcgggcgcaccggcaactggtggagagcgacaccttcagccggacgctgatacagaccgcgccggtggctctggtggtgctgacccaggatgaccagcaactggtgacctgcaaccacttggccgcccagtggctgggcgggcccacggagatccttgggctgacttccaactggaagcttttcgatgcgcgtgggcaggtaccaggagacatctgtatccaggtcggtgggcgctatttgcagaccgccttcgcggcgacccgctatgccggcaccgaggcggtactgtgcgtattcaacgacatcacggtccactgcgaggcggagaccgcgctgtccaatgcgaagcgagcagcggatgccgccagccaggccaagaccctgttcctggcccgcatgagccatgaaatccgtactcccctgtacggtgtccttggcaccctggagttgctcgacctgaccaccctgaacgagcggcaacgcgcctacctacgcaccatccagagttcgtctgcgacgctcatgcaactgattagcgatgtgctggatgtctcgaagatcgaagcggggcagatggctctgaccctggccgccttcaatccgctggacctagtgcgggaagtgcttggcaactttgccgccagcgccatggccaaggacctgcagttctatgcctgcatcgacaccgaagtgccggcgcaactgatcggtgacgtgacgcggattcgccaggtgctcaataacttggtgaataacgcgctgaagttcaccgatatcggacgggtggtcctgcgcgtgaagttgctctcccgcaatgatggtcgagccctgttgcagtggcaggtcgccgacaccggtatcggtatcgcacacgaacagcaggagcgcttgttcgaggcgttctaccaggtttcgggagcgcaccatgccggcggcacggggctaggactgtcgatctgctggcatctggcggaaatgatgggcggtcacctgcgaatggtcagcgagacagggctcggcagcagcttcagcctggtgctcgagttgcccgaggacgaacagtccgggctggcttgccggccggggctcttgaaatccgcttgcgtccatgtgcgctcgcccgtgcgggagctagccgacagcgtaggggcgtggctgaaagcctggggctgcaaggtcagcagcggcgaggcggcgccctccgagctggagacttgtgtgcttctggagctgctgccgatggcggccgggcctgcttcttcgccctggccaggcccccgggtgcgcgcgtccatggatgcgccttgccagccggagctgcgtgaggacggctggcgtgtcggcctgcacaacctggcgggaatcggccaggccctggcgcaggctctgggtggcgatatccccgagcaaacgccggcaaatgcctgcgcccgctcggggagactcgacctggaagtgctggtcgccgaggacaacccagtcaaccaggcgctgcttcgcgagcaactggaagagctgggttgtcgcgtgagccttgccggcgatgggcggcaggccctgcagctgttcgacagtggtcgcttcgacctcctgctcagcgacgtcaacatgccgaacatgaccggctacgaactgacccaggcgctgcgcgaacgaggcgagacgctgccgatcatcggcgtgaccgccaacgccctgcgagaagagggcgagcgctgccgggcagtgggaatgaacagttggctggtgaagccgatcactctgcataccttgcatgaactgctcagtgagttcgctcgcgcaggtgtcgtgcttcccgcgcaagcgcgagacctcggcccgcccgcgcagctcgacgacggtctctcaccgcaggtgccggaacgcatgcgcgcgcttttccttgagaccatgggcaaggacctggaggccgcccggcaagcgattcgccgcaacgacccgaaggggctgcagcaggacctgcatcgcatggccggctccctggcggtgatgcgtgcgcgaacgctggtggtgatgtgtcagggcgccgaggaaggcctgctggagtcgcgccttgaatgttccgccgtggagattggcgaggtgctcgttcatatcgagcaggcgctggagtttgtgagaaagacgggctga

SEQ ID NO: 18 - DNA, 696 bp, Pseudomonas aeruginosa
atgcgtccggggtcaatagttggaattagaacacaagagaagcctatgagtaagctcaagatagtactggccgatgaccatccgatcgtgcgtatgggcgtatgcgacatgctcgagcgcgacggtcggttcgaggtggtgggcgaggcctccacgcccagcgaactggtcgaggtgtgccggcagagcgagccgcatatcgccattaccgactacagcatgcccggggacgagcgctacggcgatggactgaaactgatcgactacctgttgcgcaactttcctcgtactaaggtgctcatcttcaccatggtcggcaaccgcctgatcctcgacagcctctacgatcacggggtgtccggcgtggtgctgaagagcggcgaactcgacgagctgctcttggcgctcgacgtggtgaagcagaaccgcgtctaccggggcgcgaacatgctcgacccgaccagtgttctggcgaaccgcgacgaagtggaaagccgcttcgcgcgcttgtcgatgaaggagttcgaagtactccgtcacttcgtttccggcagcaacgtctgcgatatcgcacggctgctgaaacgtagcgtcaagaccgtaagcacgcagaaggtctcggcgatgcgcaagctggaagtgaacagcgaccaggccttgatgaccttctgcgtgcatgccaacttgttccattga

SEQ ID NO: 19 - DNA, 717 bp, Pseudomonas aeruginosa
gtgtccagtaagatcctgctgcaaggggcactgctcggcctagcaatgctggccgtgctggacgcccgagccggagtcaccgccgagcgcactcgggcaataatcgccgaggggcaccgcgagacgtcgctgctgctggtcaaccagaatgcctatccggtcatagtgcagacctggatcgacgatggcgccccgaactcgacaccgcagtctgcccgcgcgccgatcatgccgctaccgccggtgttccgcctcgaacccggacagcaacgcagcctgcgcctgctgcggaccggccaggcgctgccaggggaccgcgaatcgctgtactggttgaacctctacgaaatcccgccgcaagccaccgggctgctggccgaaggacagtcacggctgaccgttacactgcgcacccagatgaaagtcatctaccgccctcgccctctggccagaggtgcggaagaagcgccacaccagctcaggttcgagcggcggggcgaaacactacagatggagaaccctactccctatttcatcagcctcgccggcgccgagcttggcggccacacccgcctggcggcggccgaactgttgccccccttctccaggcgcgtcctggcgctccgccaggcgctgcccggcggccaggccgaggtgcgcttcagctggatcgatgacggcggcaatctccagcagggacggagcctgcttcactga

SEQ ID NO: 20 - DNA, 1347 bp, Pseudomonas aeruginosa
atgaaaacatccctgcgcgtcctgcctctgctcctcgcgctgctcgcctcgtctagctgggcgacctgctacaaggtcacggcggtaggcaacgccacgactacctccaacacccagatacgtcccggtgaaggctctgccggcacctgggccggagcctgcgatacctgcaacggttccctcggtctaccgagcgtgatcaacgtcagcgacgccagcttccagcccgacggtagcttgatcgccagctcggtggcgccgctcagccaatacggcgacagcgccggctacgacccagagcgcgtgttcttccgctgtgctccagaggacgatgtgtacgagatgttctccaccaatgccgacgatctctacagcggctggtacctaggaggcgacagtgcgggcaactcgattggcctgcagtccgcctatcgcaccgcctggcccaacgtgctgctgcgcctaacccacgtggaaaccgggcagtatttcaccgatgtctggcgcgagcgtctgctcggcgggctcgatatcgactcgcgaggctttcaactggtcaaggcgaagaacctcagcgcggtacgcgccgaactgttccgcgctccgctggagttcatccgctactactcgccgactaccgcctcgcggttgtacgcctacacccagcccgctggctacatcgccatcaagggtcccggcctggcctaccccaacgtcggcgccagccataacgccaactacctcggctggcactacaactggccgggcgccatcggcctgtacaacgacgtgacgctcaagcgctatcccacctgttccgtaaccaacgtcacgccccacgttgtgttcccgtcgatttccctcagtgagattaatgccggcgcgaaccgtgagatgcccttcgaggtggccttcaagtgccaaacgggagtgatcaacagcaccgcctccagcggtactgcactgggtatcagggcttcagccggggcgcaggccgcgtccgctgcactgggcctgaggaacgccaatggcgggctctcctacctagtttccgaccgctacggccagcctggtatggcccaaggcgtgggtatccgcttgctgcgcgacggcagtgcgatgaacctgctggtaagcgaggattccgcgatgggcagcaatgccgaaacacggggctggtatccagtgatcggcaacgcctcgaacaagactggcgaagcgggaggcatcagccagtacagcgagaccttccgtgcgcgcctggaaaaactcaccgttggcagcatgcccagcgttaccccgggacgggtggaggccagcgcgcaggtagtgattcgtgtccagtaa

SEQ ID NO: 21 - DNA, 2613 bp, Pseudomonas aeruginosa
atgttctgccacgttgaggcacggcgcaccggcaaactgccgctggctctgggcggcctagcgctggccttcgcgggcctggccaatggagaggcgcagtatcgtttcgacgacagcctgttgatgggctcgggcctcgccggcgggaccctagaacgcttcaaccgggccaaccaggtggaccccggaacctaccatgtcgatgtctatctcaacggcagctacgccagtcgcaccaggatcgagttccgcccccgggccggcggcgtcaaaccctgcttcggcgaacgcttcttgcgccggacgctgggcgtccgccccgcctctgaggccggcgtgcaagcgcctggagattgcctggggctggaagaacgcctgccaggctcgaccttcaatctcgacaccgcccttctgcgcctcgatctctcggtgccccaggccctgctggatatcaagccacgcggctacgtgggtcccgacgagtgggacgctggcagtagcatgggcttcgtcaactacgacgccagcttctatcgctcgagcttcgacggagtaggcggcaacggcgactcggactatggctacctggggctgagcgggggcatcaatttcggcctgtggcgcctgcgccaccagtccaactacagctactccagctatgcgggaaacacccgcagcgactggaacagcatccgcacctatgcccagcgcgcggtgccaggcctgcgcagcgaactgaccctgggcgagagcttcaccgagggcaatctgttcggcagcctgggttatcgcggcgtgcgcctggccagcgacgaccgcatgctggcagactcgcaacgccgctatgctccacaggtacgcggtacagcgaacagcaacgcacgggtggtcatcagccagaacggcaagaaggtccacgaatccgccgtcgctcccggtcccttcgtcatcaacgacctctatggcaccgcctacgacggcgatctggatgtccaagtgattgaggccgacggcagcgtctcgcgcttttccgtgcccttttccgcggttcccgaatccatgcgcccgggcatctcgcgctacagcgccaccctcggccaagcgcgccagtatggcgacggcaacgacctgttcggcgacttcacctatcagcgcggcctgaccaactcgctaaccgccaacctcggctcgcgcctggccgaggactatctggcgctgctcggcggaggcgtgctcgccacgccctacggagccttcggcttcaacagcatcttttcccatgccacggtggagaacggccagcgcaagcagggctggcgtgtcggtctgaactacagccggaccttccagccgacccagaccactctcaccctggctggctaccgctattccaccgagggctatcgcgacctcggcgacgcgctttcggcgcgccacgccgatgagcacaacgactcctggaactccagcagctacaagcaacgcaaccagttcaccctgctggtcaaccagggcctggggggctacggcaacctgtatctgtccggagccaccagcgactactacgacggcaagagccgcgacacccagttgcagttcggctacagcaacacttggcgccagctcagctacaacctcgcctattcgcgccagcagaccacctggtaccgcgatctgaacgacgactacgacccgtcactgccgccgcaatacaacctgcggcacggcagcgaacgtagcaacaccttaaccctgacactttccatgccgctggggtcctccagccaggccccgaatctcagcgcgatggcctcccggcgttccggcgacagccgcggcagcagctaccagacgggcctcaacggcaccctcgacgaagaccgcagcctgagctacgcgattgccgccgggcgcgacagcgacaaccacggcagcgatttcaacggcagtctgcagaaacagacctcggtggcgacgctgaacgccggctatgccgagaacagcagctaccggcagctcaacaccggcctgcgcggcgccgccgtgctgcatcgcggcggcctgaccctcggcccctacgtcggcgacactttcgccctggtcgaggccaagggcgccagcggagctggcgtacgcggtggtcagggcgcgcgcgtcaacggcaatggctacgccgtggtgccatcactctcgccctaccgctacaacccggtcagcctcgatccgcagggcatgggcgaagaggccgagctgctggagaccgagcgcaagatcgcgccatacgccggcgccgccgtgcatgtgaagttccgcacactgaccggtcacccattgctaatccaggcccaactcgccgacggcagcgcgctaccgctaggggccaatgtgctcgacagccagggtgtgaacatcggcatggtcggtcaaggcggccaggtctatgcccgcgccgagggcgacaagggccgcctgcgcgtgcaatggagcgaacgcccaggggacgcctgtctgctggattacgacctcgacactggccctcgccaggctatcgaacccggacaggcggtgatccgcctgcagggcacctgcacgcccgtctcggaggcaccatga

SEQ ID NO: 22 - DNA, 747 bp, Pseudomonas aeruginosa
atgaatacttttccactgcctccgctccgtgcggctacgctggcgctcgccctgctgatacccgccatcccggctcaaagcagcgtggtgatcatcggtactcgcgtgatttatcccggcgacgcccgggaaaagaccgtgcagatgatcaatcaggacgcattccccaacgtgatccaagcctggatcgacaacgacgacccctcctccaccccggagactgcaaacgcgccctttctggtcagcccagcggtgacgcgcatagcccccggcagcggccagaccctgcgcctcctgtataccgggctcccgctgcccgaggatcgcgaatcgttgttccatctcaatgtgctgcagatcccgccccgcgacctggccaaggccgagcgcaaccagatgctgctgatgcagcgcagtcgactgaagctgttctatcgccccgccgcgctgcttggcggctcggagcagctagtcgagcagttgcacttcagcctggtgcaggcgagcggcaactggcgtgtgcgggtggacaaccccagcggctactacgcctccttcgccggcgcgatgctgagcatcggcgaacgtcgctggcggctgctgtcgagcatggtcccgcccaaaggccaggccgagtgggcggcggaacgcccttcgccgctcgccccaggaccggtccagttgaacgccctcttgatcaatgactacggcgcgcgaatggaggtccagcatgttctgccacgttga

SEQ ID NO: 23 - DNA, 549 bp, Pseudomonas aeruginosa
atgaaacctcaaagtactgccctgactatcgccgcatttctcgcattgccgggtatcgcggcggctgccaataccatcaccttccacggagaagtgaccgaccagacctgttccgccgtcgtcgacggacgaaccgacccgaccgtgatactcgacaccgtaccggtaagcgctcttgacggcgcagtcggcaaacccgccggggaaaccagcttcaccctgcaactgaccggttgcgccgctccggcggccgatgccgaggagcacttcagcgtgatgttccaggcggtcaatccgaccagcgccggcaatctgaccaataccgcgtccgccggcgccaccggcgtagcgctgcagctactgacggcaccgggcggcagcgaggtcaatctggccggcgggtcggccgtggctgccggtgacatcgtgctcgcaggaggcgagaccagcaccagctacgactatgccgtccgctacatctccgaagcgaccaccgtcactccgggaccggtgctcggctcggtgacctacaccctgcgttacgagtaa

SEQ ID NO: 24 - DNA, 266 bp, Pseudomonas aeruginosa
agtccgcacggtagtgacgactggaagcgcttctgtgctgccaacaacctggagcccagcatgagccggcgcggcaattgttgggatatgccgtggcggaatccttcttcagtagtttgaagaaagagcgtatccgcaaacgcatctacaaaacccgagacatggcccgggcggatgtttttgactacatcgaggtcttctacacccgaacccggcggcacagtcatctgggtggcgtcagtcccgaggcctttgaaagcgcctcg

SEQ ID NO: 25 - DNA, 747 bp, Pseudomonas aeruginosa
atggctgaagtcactcaacgagcagagcagcaacaagagagccagaagacccttctcggcaccatcatcagtacgcccttccaatttctcggcgtgatgttcgggtcgctgatcggcgcaatcatcgtggagtgggtttgcctgtatttcttctggcctgacgcgggctggaagcatgcccaggccatgtttgagtacgaactcagttggctgtcgcaggggctgctacacagcgtcgtcgtgcaggagccaggtcgaaccgccacctggctggcccagttggcctatgactggttgttcgtgaagaccgggatggtcgactggatgaccaacatgactaccatcgcgcaggccgggccacggagcccgctggacgttcgctatctcaccgcccagggtgtctccacgctgcagaactacggcctggccgcgctgtacacggtgctgacattcgtcgtgcgcctggtgatcctggtcatgacgatcccgttattcgtgatggccgcgttcaccggcctggtggacggcctggtgcgccgggacctgcgcaagttcggcgccggccgggagtccagctacctctaccacaaggcgcgcggcagcatcattccgctagcggtcgtcccttggacgctctacctggcaattcccatcaacatcaatcccctgctcatcctgttgccctgcgccgcactgctcggcgtagcggtgtgcatcacagcatccaccttcaaaaagtacctatag

SEQ ID NO: 26 - DNA, 2235 bp, Pseudomonas aeruginosa
atggctggccagtacccgttggaagcgctcttgcggcctgccgtggagctctacaccaccaccgtgtgcttcaccgcagccgcgctctgcatcgtcgcgccgtggacgttctccctcactccgctgttcggcatcgtggccgcgctgtgcttcgcctggctgggtatcgtgcggctgaagcaggccggcgtggtgctccgctaccggcggaacattcgccgactgccgaagtacacgatgaccagcgccgagatgccggtcagcaacgaacacctgttcatcggtaaaggatttcgctggacgcagaagcatacgcagcgcctggcagatacctacctgccccagttcgcctcttacgtcgagccctcgcccctctacgagcgcgcgcgccggttggagaagcagctcgagttcgcccccttccccctgaagctggtcgccaaagccactgcctgggacgtggcctggaaccccgcacggccgctgccgcccgtgggcggtttgcctcggctccatggcatcgagccgcgcgaacaggacgtaggcctgcaactgggcgagcgcgtcggccacacactggtactcggcaccacgcgggtgggtaagacgcgcctcgcggagctgttcatcacccaggatattcgccgcactcactgccgggtacgacgccggcgggtgaagatgggccggcggacccagacggttcaccacggctatcggcgccggcgcgcagaggagcagccggactacgaggtggtgatcgtcttcgacccgaaaggcgacgctgacctgctgaagcgtatgtacgtggaatgcgaacgtgccggccgcctggacgagttctacgtgttccacctcggtcatcctgacctgtcggcacgctacaacgccgtcggccggttcggtcggatctccgaggtcgccacccgcgtcgccggccagctctccggcgagggcaacagcgcggcgttccgcgagttcgcctggcggttcgtcaacatcatcgcccgcgcgctgcacgcgctgggtatccggcctgactaccagcagatcctccggcacgtcgtgaacatcgatgcgttgttcgtcgaatatgcgcagaaatacatcagcgagcacgatcccagggcctgggacaccatcatccagatcgagggcaagctcaacgacaagaacatcccgttcaacatgaaaggacggcccctgcgggtcgtagccatcgaccagtacctgacacagaaacgcatcgccgacccggtcatggaaggcttgaagagcgccgtgcgctacgacaagacctacttcgacaagatcgtggcctcgctgctgccgctactggagaaactcactaccgggcggatctcggagcttctttcgcccaactacgcggacctcaacgatccgcggccgatcttcgactggatgcaggtcatccgcaaacgcgccgtggtctacgtcggcctcgacgcactatcggataccgaggtcgccgccgcggtgggcaactccatgttcagcgacctggtctcggtagcgggtcacatctacaagcatggtgtcgatgacggcctgcccggctcgctcgccagcggcaaggtccgcatcaacctgcatgccgacgagttcaacgagctgattggcgacgagttcatccccatggtcaacaaagcgggcggcgccggcgtgcaggtgacggcctacacccagaccatgagcgacatcgaggccaagatcggctcccgcgcgaaggccggtcagatcatcggcaacttcaacaacctgttcatgctgcgggtgcgcgagaccgccacggccgaactccttaccaatcagctccccaaggtccagatctacaccagcacgccggcgagcggcgccaacgacgcgatcaacaacaacaagaaggtagccttcacctccagctcgcacgaccaggtgcagatgaccagcgtgccgatgctcgagccggcccacatcattggtctgcccaaaggacaagcgttcgcgctactcgagggcggcaatctctggaagatccgaatgccgctgccggcggtcgcccccgacgaggtgatgccgaaaagcctgcaggagctggctgccggtatgcgcaagggccaggccgccaacagcgagtggtgggaggcgccgggatactccgccctgcaggatggtctgccccaggacctggtcgacgatttccgtcacctcggcaccggtgaggatgccgcctga

SEQ ID NO: 27 - DNA, 258 bp, Pseudomonas aeruginosa
atgactactcatctgatcaccctagtcatcaagcagccgagcgacgctcaggcacgccaactcatgtaccaggagttgctcggactgatctcacgctacggcggtgaggtgacgtccaaggccttggaggacgagtcgaccctctgcgagctgctggtgcagatgctgcctgatcatgaggtagagcaagccaggaaacaggtgctcgaacttcatgccaagggccgcctgcaggcgccggcaagcctgaaggtgtaa

SEQ ID NO: 28 - DNA, 501 bp, Pseudomonas aeruginosa
atgaagaagttccttgccacgctggcattttgcacggcgttcgcgactcaagcctgggccgccgggctgatcgttgtcgaagacctcggcggcgcctcggcgctcccctactaccagggcctggatccgcagccatccgcttccgcaccaggacctggcgacctgggcgtccgtggctcaggtgcgtttccagttcgctccgcccgcctatcgccaggacgggtccaggggcgcgccatcaacgctccaggcctgcaactgctgttcctggtcggcgacgacacgctgtctcgaacctggctgaaagagcgaggcgacgagcttcgagacctccaagccgtgggcctggcagtgaacgtggccagcgaagcgcgcctgacggaaatccgggcctgggggaaaggacttcagatattgccggcgccggcggacgacctggtcgaccggctagggctgcagcattaccccgccctcatcacatccaccgccatccagcagtag

SEQ ID NO: 29 - DNA, 582 bp, Pseudomonas aeruginosa
atggcaacgtctgtagttcgagccctccagttggccaccctgctggtcctggtcaacatcgctcaggccgccgtggatccaccgccggcgtacaagcaaatcgccctgcccaaaggggttccggccgaggtgctctactcggtcgcgctgaccgagagcaaggtcctgctgcgcggcgaatacgttccctggccctggacattgaacgtcgccgggaaatcttactactacgcgacccgcaccgccgcctgcacagcgctactcgcggcgatcaacctctacggggccaagagcgtcgattccggcctcggccaggtcaacatcggctggaacggacatcgtttctccagcccctgcgagtccctggatccgtacaagaacctggacgccacctccgacatcctgatcgagcagcgggacgccctgtatgcatccgccccgggaagaccggtggactggatccaagttgccggccgctaccaccgccccgccggcggcgcgcctgccgccaaataccgtaggacggtttcccgccaccttagccaagttctcggcgtcaacctactggtgaccaatccatga

SEQ ID NO: 30 - DNA, 756 bp, Pseudomonas aeruginosa
atgatcagaaccgtatcgctcctgtccggcctgatgctgctgctgagctatcccgcagccggccaggaggcggcggcaagccgagaggccagcagccaactgtccggtagccaactcggcacgctgaaacaacagacatctcagagcgacctggcccaggagtggggactgaaccaacaggaatggacccgctaccagacgctcatgcaaggcccccggggcgcttactcgcctggtattgatccgctgaccgcgctgggcatcgaggcgcgatcggcagaggaacggcggcggtatgccgatctacaggtccaggccgaacggcgccgggtcgagaaggaactcgcctaccagcgcgcatacgacgaagccttcgcccgcgcctatccaggcgagggggtgatccgcctcaccgaaagcagcacagccaacccgtcgggcacgccgaacatgagcccagcgttgcagagcagcgggcgcctggccctgttcgtccaggacaactgcaccgcctgcatccagcgggtccgcgacctgcaacatgcagaaaaggagttcgacctctacttcgtcggtagccagaacgacgcagagcgagtgcggcgctgggcaatcctcgccggcatcgacccgaagaaggttcgcagcaagcagatcacgctcaatcatgacgagggccgctggatggccctaggactgggcggagcccttcccgccctggtacaggaggtgaacggccgatggcaacgtctgtag

SEQ ID NO: 31 - DNA, 690 bp, Pseudomonas aeruginosa
atgaaacgcccatcccctgcatcaatgattcttggcctctgtttgacggcaatggccggcctgctgagctaccagcagtaccaactcgttcagctccgatcaggcgtggacagtgccgcggaaaaggcctcgctggaggcgatcctggctcgcttgagtcgagtcgacgagcgcctcgacgccgtggatggacagcacctggtcagcaacgaggacttccgttcaggccagcaggcgctgtccaaccgaattgacgctgcgcaggcgttcgccaagcaggcctccgatgccgtcgagaacctggctcagaccaccgcctcggccggcgacctcttggtgctcaaggcaaccgtggagacactggacggttctgtccgcacgcttcaagaaaagcaggccaaggcgccgccgctgatcgtgccagcgccaaaacgccccatacccgccaagcccaagccgaaacccaaaccgatggagcccccgcccttctcgatccttggcgtggagtatcgcgggggagaacggtttctgtcggttgcacctccgggatccacccagctcagccagatctacctcattcgccggggagatgccgtcgccggcacgacctggcgactgaccgaccttgacgatggtaccgcgcacttcgacgtcgccggcacctcgcgcagcgttcgcatccaaccatag

SEQ ID NO: 32 - DNA, 217 bp, Pseudomonas aeruginosa
atgccgcgccgcttgatcctctcggtcacggagcgggatatcctatttgcactgccggtaagccgaatgacctcactgactactccacctcaacgagtccgccccatcgtcgatccgccagcgacgcggcgatgccaatcacttggttttttcggtgcaggtcagcctgctgtgctatccagcgttcagccctgatgcgcgacgaagagcccccgag

SEQ ID NO: 33 - DNA, 1032 bp, Pseudomonas aeruginosa
atggccgaagctatcagaaaggatgcaatgatgacaaaactctactttgatcttctgaactcgcctgccgaggctcattcgtcgatacaaaagtctttatctgtgcaggcaatctccacaactgtcccaatactggagtttccttcggaaaccgtatacgcctatgcatcgtacataaatgcattaagtatcggtcaacgcatagatcctgcattcacccagagcttaacgagtgccatatccaacctggcaggtcgcccgattgcagtaagcgacatttaccaaaaaattcatgaaaccacactgagaacacctgttgagatgggcgttcgtcctaatagcatcacctttgaggagtatcaggccaccataaatcagcaagccatcaacatggttcaagatatgcaggatggagacaaaggtgagaaggtggaggccctccaggccaatatgcagttcctgtatggacaggagataaatactgatttcatcgctcgtaatgaactcgctgctgggcagagagcgaaaaccgtcgcaatagttcaggggcatatcaccatcgggtacggcttcgataccttcgtgcatgaagcgtccgagctaaactctttgaatcttgttggttctacgcgacagaaggtattacctgcattgcagctatcaacgtccgacccaggcttctggagcgtctatgccttgctgggacaaagtctcacggatgacgatgggctattactctttagtgccaaagcgcgagctgttgttcaacgcatagcaagcaaccagtttgcaggtaagtggaatgggctacccccagctatcaaaacggttgcgcttgatctatattatcaatatgggcagactggtaattttccaaaatttcaacaagctataaatagccatgattggccggcagtcatccatgaacttagaaactggaatggtgtaccgaatgatcctctccagttcattacaaaacgattggaagagcgagccaagtatctggcaatatccttcaactatgagcaatga

SEQ ID NO: 34 - DNA, 666 bp, Pseudomonas aeruginosa
atgaacaacacagtgagcgaaacgcaacagatcaatatttaccaaaatccggggcagtctatttccggtctctacaaggggctggctaaccagtgctctcctggccagccatttccagaggtacagcttgtggaggcttgggatatccctctcgtactccatccggagtttgtgcctaacggagatgtctcgaaaatcgataaggagtacggaacgatccttgctgctgagtcagctcaggttatcctgcttcaactccaaatggctcaagacaaggctaaggcgtgcggggaggttacagccttgatcagttctgtctcctccaatctcaataccattaagagtcgtcatggtgctaattatctaaacctgctgaaacaatcaccgaaccgatacccgactagcgtcggagttgagatcatgtcaggtggcagtccgaaccaggattctggaatcgaggtctcttacggtgccagtctcggccgtctaactcaatcacaacttcaggcgatgaatctgcctgccagtctcaaacagttgctcactcagggaatcggtgtgaagctttctcagcctgaatattggcctgcttacaacaacatagccactggtattcgttatacaaccggagtggcgataacgttggcctattgggccacggtttag

SEQ ID NO: 35 - DNA, 675 bp, Pseudomonas aeruginosa
atgacccaagctgcgaaaataccagcaaatgagtactcattgggggatggaagaggctacatcaatatctggccggaaaaggatgaggctcaggcatttcttatccataatgatgggcctaatggggctacatgcagccttaaaggcactcttagagataataaaggagtggtgcattcgccgtattcctctgcttcatgtttgctaagtatcacccagacagggctgctgtcagtaagcgtcaaacgtgaggaaaattcgccaagctgctctgcatggtgcggtcctagagtttggtttgaaggagcctatagcgtcccgcccaagggctgctactatatgcaaataaggaaaaaaactcgacaaatgttgggtatgattgagaaaaaagagcttgatgccgctcgcgccttatcaaataagcttttgtcagactgcgcaaccgagctagcctatcctgccaagatatacttgacgaacacacttgccatgatcagtgctgaaaagggagagaatgctcgctgtttggagtatgcccatcgggtgcaaaagcaaattcctgtaagagatgacggccaaccggctgaagacttgctcccggcggagcacgctttcgctatggaacaacgcgccaaggctgatgctctgtctgagcgatgcagcgacgagaaataa

SEQ ID NO: 36 - DNA, 246 bp, Pseudomonas aeruginosa
gtgctggtagagcgtttgccgactgatgttgaattcgcgggcgagctgagccttgggctcgccggccgctgcccgcagccccagggtagcacctgcttgtcggacaaggcctctttgcggccccggtacgcgcagagcttgatatcctcgcgctaccgcgctggtgctgcttgtatgctgctcagcaagccagccgccggtcttttcagggtaagcgtacggccaatacacctttacttaggttga

SEQ ID NO: 37 - DNA, 360 bp, Pseudomonas aeruginosa
atggatattcgcctggagattttagcgcttgaacagctgttgctagagccggaatcgagaaagaatgatcgactgcttaaacagctgcttaccgaagacttcgttgaatttggagctatcggcaaaagctggacgaaagcggaggtgatcgtgggactaaaatcccagacttggatcaaaaggacaatcgaggatttcaaactgcgtgtgcttgcagatggtgtcgcgttagcaacgtaccgatgccgtcatcaaaatgctaatggcgatgagtcgttatcaatgcgtagctctgtttggaaaacctacgaagatggttggcacatggtgtttcaccaaggcacgagggtctccgagtag

SEQ ID NO: 38 - DNA, 1536 bp, Pseudomonas aeruginosa
atgacttcctcgcccaaccttgaccagatgaccccggaacagcttcgtgccttggcggcacaggcgttgcagttgcaatcccaggtcgaggcgatgagcaggaaaatccgcaacaatgaaaccctcatcgaacagttcaagttcgaaatcgctctgctcaaacgccacaagtttgccaagcgcagcgagcaaatcagttcggcgcaaggcagcttgctggatgacctgctcgacaccgaccttgaagctatcgaggccgagctgaaacaactccttccagcttcgccacaagccgagccacggcaatccccgaaacgttcgccattgccgccgcagttcccgcgcacggtgattcgccacgaacctgaaaatacccaatgcgcctgcggctgccaacttcaacgcatcggcgaagacgtcagcgagaagctggattacacgccgggcgtgtttaccgtcgagcaacatgtgaggggcaaatgggcctgccgtcagtgcgaaaccctgatccaggcgccggtgccagcccaggttattgataaaggcatcccgaccgcaggtttgttggcccacgtgatggtggccaagtttgccgatcacttgccgctgtacagacaggaaaaaatctttggccgcgccgggctgccaattgcccgctcgaccctggcgcagtgggtcggacaaactggcgtgcggcttcagccactggtcgatgcactgcgtgaagccgtgctgaaccaggacgtgatccacgccgatgaaacaccggtgcaaatgcttgcaccaggcgagaagaaaacccaccgggtctatgtctgggcctacagcacgacgccgttttcggcgctcaaagcggtggtttacgacttcagcccaagccgtgccggagaacatgcacgcaacttcctaggcgactggaatggcaagctggtctgcgacgacttcgctggatacaaggccggttttgaacaaggcatcactgaaatcggctgcatggctcatgctcgccgcaagttcttcgacctgcatgtcgctaacaaaagccaactggccgaacaggcgctgcactcaattggcggtttgtacgaggttgaacgccaggctcgggacatgagcaacgaagaccgttggcgaatacgtcaggaaatggcggtaccgatcagcaaaacactgcatgactggatgttggcccagcgcgacctggtgcccaacggctcggccacagctaaagccctcgactacagcctgaaacgctggggagcgctgacgcgctacctggacgatggggctgtgcccatcgacaacaatcaggtggagaaccagatacggccgtgggcgctcggacgctcgaactggttatttgccggatcgctgcgcagtggcaaacgagcagcagctatcatgagcctgatccagtccgctcgcatgaacgggcatgatccgtatgcctacctgaaggacgtgctaactcgcctgccgacgttacggtcgaaagacatcagccagttgctgccgcatcagtgggtacagatctag

SEQ ID NO: 39 - DNA, 336 bp, Pseudomonas aeruginosa
atgatccgcatcgatgcgatctggctagccaccgaaccgatggacatgcgcgccggcaccgagacggcattagcccgggtaattgcggtgttcggtgcggcgaagccgcactgcgcttatctgttcgccaatcgccgggctaaccgaatgaaagtgctggtgcacgatggcgtgggcatctggcttgccgcgcgtcgactgaaccaaggcaagttccactggcccggcattcgccatggctgcgaggtcgaactcgacagcgaacaactccaggccttggtgctgggcctgccgtggcagcgcgtcggcacaggcggtgtgatcagcatgctgtaa

SEQ ID NO: 40 - DNA, 267 bp, Pseudomonas aeruginosa
atgcgccaacgaagctcttacccgaaaccgttcaaagcccaggtcgttcaggaatgcctgcaacctggggcaacggtgtccagtgtcgccatcagccacggcatcaacgccaatgtcatccgcaaatggctgacgctttatcgagaccagcccgtaccagcctcgttaccagcctttgtcccgctgaaggccacccctaaacggccagccgaaacgtcagtgctcattgaactgcccatggccgggcaaatgatcacggtgaaatag

SEQ ID NO: 41 - DNA, 1227 bp, Pseudomonas aeruginosa
atggctttatctcttattcgtagtctcactgcgtccgcctcacgaaacatctcggcgttgaaacgcgatgccaaacgcttgcagaagaactcctttcttgtgtttggaacagaatatccactcaaggtttgccaaaatgcggtagcagtttctcgcggcttccgctcactcgctgatgtcgataaactggagcagcacattggcatgaatagaagcgctccattctgggtgatccgtggccgcaacgatacacaccagggggtactggaagcgctatattgtttagaccttgaatataccgagaatggccccgtcgtttttactggaaacccaaagcactctatacttccagccttagtcctttttcttgagcaaatgagctttaagaaactacccggactaatcctcatcgaaacaaaagagacctcaatccaaacaacccatatattcgacgcaatagaaaaattagaagtcgaagaaactctaaataaatttcgatttcttgacttgcgagaccgaaaccttcccgtttcgcttagtaccgaggctcgttgctggatcgagtcaattgtcagtttattgccaaacgacatccaagaggaaatacgtaataaaggatggtcaactcacttagagatcagtgcatatgagcatgcaaagtctcgtaatcaagtatttggctcctccaacttcccttgcgtccccttcctctccataaagtcagcgatctatcaactcatttcaggcgcataccctcccttatggatgcagccatcctcctctggcgaaatatctaaagttgatatacgccgacctcctctcgaaaaaagctcagaggaaaccttactttatctcataaaaaaattagagaatcgacagttccacacaggcatttcatgtgagcatgagagtcgatggcggccgtatgtcgtactcttctccaggaatgatccggctagcgaggtactagcaggagttatacactcgtacttttcttggaagcaagatagagaccatcgctcacccaccctttatgtttcagatggagcagttccctatgctcccaagcttctaggtttaggcggccatacggtcattgcaaatggaatcactgaaattcccgacggggatggtcttggggagttctatggctacaagaactcacttaaagtcagctccttatctaacggaatacagttcatgggtaagcatgtatcactaaagtaa

SEQ ID NO: 42 - DNA, 2250 bp, Pseudomonas aeruginosa
atgaacgctctgacccaaccggccgccctcgccgcctcccacctgaacatcaacctgaccgacttcatcgacgagttcggcgacgagctcctggagtcgctcaatcgctccaaccccccggtctataccggctccgtcaacgctcaccgccagttggtgatggaccgactcaagcgcaagcccttcgcggcccaggccgaggtcgtccaggccatcaccgccctgctgctggaccgtaacgagcaggccggaatcatcaacgccgagatgggcaccgggaaaaccatgatggccatcgctgtcgcagcggtcatgcacgccgccggctatcgccggaccctggtcgtctctccgccgcacctggtctacaagtggcgccgcgagatcctggagaccatcccagccgcccgcgtctgggtactcaatggcccagatactctactcaagctgctcaagctgcgagatcagatgggcgacgcctacgacgggcgccaggagttcttcatcctcggccgcgtgcggatgcggatgggtttccactggcggctcgcctgctggaagaaacgcgccgccggcggccaactgctcgctgcgtgcccggattgcggacaggtcctcgaggacctggaaggcaacctggtcacggtggaggagttcgagcgtggtgaccgtcgacgtacctgttcctcctgccgtggggcgctctggacgctgatccgaccaggcaagcccgacggcggcaaccggcgcgcaacgattctcaagtcgatgtgccggataccaaccatcggcccggtcagggcggagcgcctgctgaacgacttcggcgaggacttcctggccacgatgttggtggacaacgtctcggagttcatcaacctgatggacgccaagggcaacttcgtcttcagcgatcggcaggccaaacgcatggagcgatcgatggcaaacatcgagttcggcttcggtgaaggcggctaccaaccgaccgagttcatcaagcgctacctacctgatggctacttcgacctgctggtgctggacgagggacatgagtacaagaacagcggctcggcccagggccaggccatgggcgttctcgcagccaaggcacggaaaaccgtgctgctgaccggaacgctcatgggcggctacgccgacgatctgttctatctcctgttccgcatcctcacccagcgcatgatcgaggacggctatcggcccaacgcgcgcggcagcatggctcccgcagccatgtcgttcatgcgcgaccacggtgtgctcaaggatatctacaccgagcgcgacggtgattcgcacaagacagcgcggggcaagaagctctcggtacgcacggtgaaggctcccggcttcggcccaaagggcatccaccgcttcgtattgccgttcaccgtgttcctgaagctcaaggatattggtggcaacgtactgcccgactaccaggaggagttcatcgacgtgcccatggcgcctgagcaggcttcggcctatcagcgcctggcggccacgctgacagcggagctccgccaggctctggcgcgacgagataccacgctcctgggcgtggtcctcaacgtgctgctggcttggccggactgctgtttccgaccggagatcgtcaagcatccgcgaacccgggacacactggccttcgtgccagcgatcttcggtgacgagcagttgatacccaaggagcaggtgctggtggacctctgcttcgaggagaaagcgaagggccgcaaggttctggcatacaccgtctacagcgggacgcgcgacaccacgtccaggctgaagaaagtgctcgagcaatccgggctgaaggtggcagtgctacgtgcttcggtcgataccgctcgacgcgaggattggatcctcgaccaggtcgatcgcggcatcgatgtgctgatcaccaacccggagctggtgaagaccgggctggacttgctcgacttcccgaccatcgcgttcctgcaaacgggctacaacgtgtacaccctgcagcaggccgcgcggcggtcgtggcggatcgggcagaagcacccggtgagggtggtgttcttcggctacgccggcagctcgcagatcacctgcttacagctgatggccaagaagatcgctgtggctcagagcacgtcgggagacgttcccgagtcaggtctcgactcgttgaaccaggatggggattctgtggagatggcgttggcacgacaactcatcgcagcatga

SEQ ID NO: 43 - DNA, 1452 bp, Pseudomonas aeruginosa
atggccctcatgttcccgcgcttggcgcgcaactttgcacgcaacggctacttccctaccgatgaggtcaccctcgaacgcgctctgcaggccctcactcttgccccgtcgggaaggatgaggatctgtgacccctgcgccggtgagggtgttgccctggctgaggcagcacacaccctcggccgcgatcaggtccaagccctcgctgtcgagtacgaccgcgagcgcgccgaccatgcccgaggattgcttgaccgagtgctgcacagtgaccttttcgacaccatgatcagcaggcagtcgttcggactgctctggctcaacccgccttatggcgacctggtggcggaccactccggtgcgtcgcagtaccagggcagcggccgccggcgtctggagaaagcgttctaccagcgctgcctgccgttgctgcagtacggcggcgtcatggttctgattgttcctcactacgtcttggacgatgagctgactggctggttgagcaaccacttcaccggcctgcgcatctacgcagccgcggatcctaccttcaagcaggtggtgatcttcggcatccgggtccgtcggcaggacctggcccgggcggacgccaatcaggtgaggtctcgcctgcaggcgatcggagcgggccaggaaaaggccgaggaaattccagcggcttggccgtgggaaccctacgtggttctgccggccaccagcgagctggagcacttctaccgagtaaccctggagccggagcagttcgccggtgaaatccagcggctgcgaggtctctggcctgacttcaacctgcacttcgcgcaagcggggctgcagccgcgcccaccagtccgcgagctgtctcgctggcacctggccctggccctggccgccggcgcgatatctggcgtcgtgcgatcgaagtcgggccggatcctggtcgtgaagggtgacacctacaaggacaaggtccgcaagaccgaattcaccgaggacgacgacggcaacatcaccgaggtgaggatcctcaccgaccgtttcatcccgatcatccgggcatgggaaatgacaccctcctcggtcaatcagggccgcgtgctgaccatcagctcctcggccgcgaccacggaagaagctgaagagccccaacctgagccggcccccgcacccgcaccgctgctgatcagccctggccgggtcgtaatgaccgcagccgtgagccacctggtggaaaccggtcaactcaacccagcgcctttgctgaaacgccatctggcgggagattggggaacgctggaccaggaagactggaacaccaaccagagagccctgaagttcggcgatcggctgctgtcgtcctacgacatcgacgccggcgacgaatccaggctctggatcatcactgaggcagaccgcagctcaaccacgcttttgctccctagcgattactga

SEQ ID NO: 44 - DNA, 606 bp, Pseudomonas aeruginosa
atgcccagtcccaccccgctctaccagatcgaagagtgtccagacctgtacgtcgacgcctgcgtgtgcgacgagcagtgcaacctggtctttctttcggcctggggccgcgacaccgtgacacaagagttcctggccaggctgacgctgggccgggaagaaaatggcatcgaccatttccacatcatcgtggacggccgccgcttacctgtcttcccaaaccaggatctcctggagaaacgcaccacccgtcagttccgcggcacgttgttcggcagcctgctcaatctttggctgttcgatcggcgcgcctcggcgcccgaccgaggcaatcacctcgccttcgcactcctgcagcgcgatgaggatccacaccagaggctctggccgctggtgatggaaacctgtccgctccccctcctgcagcactggcgcgagccggtgatggaggttctcacccagcaccagatgttgacggccctacccgggacgatcggcaacgtctgcgcctggcgactcgccctgcgggtcgacgtgcttgagcccaccctcggtgaggtaatccgcgaaagcattcttaccaccgatgctcaggcgcaagcctga

SEQ ID NO: 45 - DNA, 255 bp, Pseudomonas aeruginosa
atgaatccattgttcaccaacctcacccaggaaaccctcgcctacctcgaggaccaactgtccaacaacgacgtcgccggcgacgacgagctcatcgacttgttcatcgaggagctgtcgctgaccttggagcaggcggaagcggctgtcgcgctacgcgatcagtacctctgccaggtcttcctgatcggccaagggccgctgcaccaagccgatggactcagcttcgaccctcacaccaagagcgttcggtag

SEQ ID NO: 46 - DNA, 363 bp, Pseudomonas aeruginosa
atgggatggcttttctcacatcagacgaaggaagacctgctgcgtgagctgctggccccaaccagtaccttcgcaggcagcaccgaggtgctggcacacgcagtctccggcaatgaactttggactgtcgtaaaacgaacttttcaccttgccggattctatttcggcaagccggccggtcactcgatcaccatgatcgagctgcacttgctggactgctcggccgggcaatggggctacaagaccattccggaaagcgccggcccgttctactacggctgtccgctggagttcctggacctggctcacgatgagatcaaccaggaatggcgtaaacgcctgacgcacgaacaccaagcctga

SEQ ID NO: 47 - DNA, 276 bp, Pseudomonas aeruginosa
atgaaatcgatctacaacaccccaggcttcagcgaggagttgttgctggtttgcgcctcgctgcgcgaggtcggactggacaatctggctgaccagttccgcgcggcagtgttcgaccgatccgtcgtcgaccaggccatcatcgcactgcgtgagcgggtgaagaccccttcgccggagcatgcggccgacaacgagccctggttgtactgcgactggcaggccaggcaaacagcttaccggctcctccagcgccttgagcgcgcaacacgctga

SEQ ID NO: 48 - DNA, 690 bp, Pseudomonas aeruginosa
atcccctcaccacgatcccgcttcggcgggatcatccttttcgcaggtcataccatgatcacagttcccggacagttggccattcgaaccatcaacggtcgctatggcgagttcaatgtgggaaaactctggacttcgatcggggagttcatcatcaaggatgccttcctggatcaacacaccgaaggcaagtaccgcggtgatttcgtcatcgccaatatccgcccccaccactactccgccggcggtcggctagtcatcgagatccgcgccatagtggacagcatgacgctgaacgatatggacagcctcagcgacgaggaggtagagcgtctttccggcaatgaggtggatccgctcgacgaagtgcccgagatccagctccccacagtagtaccggcgataccaccaaagtcgccgtcaccccagaagtcgaagcctctgtgcctcgctgcaaccagggacgcgcctttcggtatggacactccggctcctgcagagcaggccgcctctctggacacagacgcggatgcagaactgttcgggacggtctggccgctaggcgaaatcgtcaagctggacaccacggtcgaccgcaagcgactacgccaacagtgcgtgcgactcggcgcgctgggctatgagctcgacttcaaacaacaggtgtggacccgcaaggaggccgcatga

SEQ ID NO: 49 - DNA, 351 bp, Pseudomonas aeruginosa
atgacctctctcaacaaccactccagcgcaggtcacactgctgcgtacctcaaactcccgatcgttctcaccaacgcggcctggctgcgcctggtctatctcgccaaccctgccagggtcgacgagatgggcacccggctggccagtgtcgttcaaaccgcctggcaggagctttctctccagccgaccgcgaagcacatccaattccacctgtaccacaaggaggaagaggggcaggaccgcgcgctcgcgctgctggttctctcgatagtcgagccgtccgatgagccttcctacctgcgcatcgagttgcaggaagagtgcctcgccgaacacccggttaccgagtag

SEQ ID NO: 50 - DNA, 708 bp, Pseudomonas aeruginosa
atgactcaactcaacccgtttattcgcggctatgagagtttccgcatcgagcgaaacctgcagatcactgacgaaggcaacaatctaccgtgctaccgcgctctgcatgaaacccagcagcacctcccagacgaatattttcagtgcgagctgtgctacttcaataacgatttcgccgtggtagtccaagagttagacgatgaaagagttgaaaaatgccctcaccaaggaatagtgagaaacgtactttacagcatctacggtgagcaggacggcagaaaaaagcttatcggagatcaatactcactgaccgaagccgagagtgtcgttcgatacctttcgttcggcggcggttataacccctgctgggagatcagaaaaacacatctacccatcagcgcgtggaatagcctctacgaaaggttctcgaccaagatgccaatccgcttgccctcggtgttggtatcgctcttctggtgtaacgagcacggtgccgtgggctttcgcttgcacaacaccccttggacggatgagtgtctggagatcctggagatgaccgcagccgctcttcgacaagaacagcttgccttcggcctcgacgaacaccttgtcgatctgcttcacctcgcgggacaagcagacattcggctcctggtacttgatccattcgcgcccacgctcaagggcctgccgctttatgacgattga

SEQ ID NO: 51 - DNA, 237 bp, Pseudomonas aeruginosa
atgggactggtgtttcctaccgaaaggagaatcaccatgcaatacggaaagctggcgctcgcccatctcagcctggaactgccgttgcaggtacttatgaataagaaccgtgcttactacatcggcacttctgacgaagaaggaccagcctcgcgcgagtcggttgaatattacccctcacgcgaacttgcccaacaggcattagaccacggcacttggacgcaactggaatattaa

SEQ ID NO: 52 - DNA, 267 bp, Pseudomonas aeruginosa
atgggaaatgtttggcgattatgccagggcagatacctgggcattgttgttggccaggaacagccaggcgaagttgcagaactgactgctgagcagcagctcgtcctcgacgtcgctgaggctaacctcctcaacttccggcagggcgggcagttctacgatttggatgttgctcatgatgatctccagataatggagaacaccacgccctggggggagatggtgccccccggatgggtatgcgatgaagagtggcgcatagcgtag

SEQ ID NO: 53 - DNA, 540 bp, Pseudomonas aeruginosa
ctgacgggcaaggtgtttctccgctttcgcttacgaaactggagaatcatcatgagcaacaacacccaagcccaagaagccaagtatttcgacctgcacaccaccggtatcggctacctcaatcgcatccgcgaggtaccgatccgccgaggtgaaccattcctcgccgtaaccgtcgcagccctccatggcgcggcagacagcgtggaatactcctacatcgactgcaaagtggtcggcgcccaggctgaaaagcttgtccgccgttgcaaggaagcagtcgaggccaagaagaaggttctgatttccttccgtatcggcgatatctgggcggatcccttcatccaccagaaaggcgagaaacaaggcaagcccgacgcaagcctcaaaggccggctgctcttcatctcctggatcaaagtggatggcaccaccgtctacgatgcgaaggaagaagctgaaaaagcccagcaaggcaaaggcgaacctcaaggtgagcccgcagcccccgctgagcacgctgaacaagccgctgcttga

SEQ ID NO: 54 - DNA, 567 bp, Pseudomonas aeruginosa
atgtccaagcaatccaccagcttcgaaatcggctttgccctcggcagtgttgtgcgtgagttccgcagagcgctcagtcgccctccggtcgtagtgcaagcacaagcgccggttgcgttgagagtccagcgcatcgatcctgccttcctggccggcccgaccgctggcgagctagaacacatcagcgacatcccagccatcgtccggctgaagaaggtcaacctgaatgactggtatctagccaatacgcgcgaggtgcaaaagcccaagcgcgcacgcaaacccaagccggccaaggcgaccgccaaagctgaaacgccagtcaggaaggagctcaagatgggttccctcgaccatttgattgcacccaactccgaaagcgaaatggggaggccccctctccagttagagtccctgaacgatcatgagattgctcttttgccagcacctcctggtagcgcagtctcttgggaactccatcggcgtactcaggagcaataccaacaacgctggcaggactacttgtccaccatgacggatgaacaagtagctgctctcggccgctaa

SEQ ID NO: 55 - DNA, 645 bp, Pseudomonas aeruginosa
atggtgtttctcctgcaggttgagggtgcggagaaaacactggccctggcggggaagtggattccccgctgggttgcggaagggagcttctatcgaccgaggccgaccgaccgcgctaccagaagctatgcggtcttgggttggatcaacacggtgggctgtgctgcagcatttcggatccgagctgcatgggggcatgtcgctgacaacgtcagcagatcacgcgttcatcatcgaagcggggggcgaaagtgtcaaggtcaagcaggagggggagcggatgcagcgggcggagagcgagggcggaagagcgcggctggtagaaaccctgtcaaaggtttccccagccgtgtctggaaggggagtcaagtgagccacctgtggttgaatcgtcgatccctgggcattgatcgtctcgatcccatcacccggccattatcgtggcttggccagcaaacagtaggcacgcatccgcgtacaaagggagccctgcgtatcaccggcgggccaccggcagggagaaggatcccgatgggtagcctgatagtcctggagcaggagcatcaggctacccatggagaggggaaaaggaggggccgtaacaccagtacgacccttaaatcgaggaaacaccgaacctcttga

SEQ ID NO: 56 - DNA, 438 bp, Pseudomonas aeruginosa
atgccgctgatgtggatcgtcctggtgctcgcgctcatcaccgggacctggctgagtgtacaaagcgaccacgcgacctcgagcgccgaactggccgaggtcgacaccctggccaggagcttgctgctcttccggtccagtctggcggagtacgcacacgccaaccccggtttcaccggttcgccggcggactccgctcttggtttaccggcctggttccgcaagccagcgcggcttcagggctacatcgccgccggcaccagctacgccttcatcgcctcgccgccggcggggctggcggcggccgtggatgctggtacggaatccgacctggttggcgtcaggcgcaacggccagttagtcacgcgccgcctcggagccactgtcattgcgctccctacgcccatccccgagggcgcggtggtcgcggtcaaataa

SEQ ID NO: 57 - DNA, 1329 bp, Pseudomonas aeruginosa
atgaggagtacgcgcagcagtggattcatctcgatcgaactgatgatcgccctcgtcgtgatcgccatcgcgaccgccggtggcatatcggtcctgatgagctacctggacggcttggacgagcagcacgcggcccagcagcaacagcaggtggccaaggcagcggagaagtacctgaaggacaacttcagcacggttctggccagcgccggcgccacggccccggcggtgatcaccgtcccgatgctgcgcaacacccgttacctgcccgcaggcttccgcgacaccaacatctacggccagcaataccaggtcctggcccgcaagccggcggccaaccagctcgaaacgctgatcgtgaccacgggtggacaggtagcttccgaactctcgatccgccggatcgcgcagctcatgggagccaccgggggctacatctcgaaaaccaacaccagtatcgcccagggcgccgcctggcaggtggccttaagcaatttcggtagcgctcccggcgctggacatctggcgacggcgctgttcttccaggacggcgccatcgccaacgagtacctctaccgcaatgccgtcccgggtcatcctgaactcaaccggatgaataccacgctggacatgggaggcaacaatatcgccgcagccggggcgatcacggccagcggcaacatcaccaccagcgcggacatcagcgcgcgcaacgtgacagccactggtacggtgaaagccggcactgctgacgtcgccggcgagacgtacaccggaggctggttcaggacccgtggtgacacgggctggtacaacgagaaatggggcggcggctggtacatgagcgacagcacctgggtgcgctcctggatgaacaagaacgtctacaccggcggcgagatgaaagcgggcaaactcaccgccgagggccggacggaagtcggcgagtacctacagctcaaaggcgtggccaccgaaggagccaactgctcgccgaacgggctggcaggcatcaccagcaccggactctggctgtcctgccaaaacgggaaatggggacgaaccgccgcctccatgcgcctgaacaccacggccggcgtgatcaaggactggtgtacgttgcatggtcaggatagcgccatggtgaactacgactacgtccgctacgcgatcacctgcggcggccgattctgcgcagtgggcttcaaccagacatttggcaccaactactcgttcgggctaatcactgagatcggcccaggcttcaactacccggaaccctacaagacccccgactcgaccaacgtgaccgttacctgcgtgaactag

SEQ ID NO: 58 - DNA, 942 bp, Pseudomonas aeruginosa
gtgagtgtgaacccgatcatccaggctcagttcgtcgacctctacctcggtgaaggcttcgccgacgtgaaaggcctggccggcgccggcgcgcgccgagtcgaagtgcctcgcgagtgggagtcgcacgtccaggaactgctccagatctgcaggcaaacgctggaggagctgcaggaccctgagttcgccatcgtcgtcgacggcgttctgcttcgcgtcaccctcctcgaagacgctttcagtggcagcgtcttcgtgctgcgccggtcgagcgcccaattgcgggagttccaagagatcggctatccgagcgaagtggtttccgcactgatggatccgcagttgcagggcctggtcctgttctgcggcgagatggcgacaggcaagaccagctccgccgcctctctgctcctggcccgcctgcaggagttgggcggggtgggctgcgccgtcgaggacccgcaggaaaccaacctcagcggtcagcatgggctcggccgctgcatccaggtcagaacctcacggcgctcaggcggatacagcgaggccctgctgcgcacgctgcgggccggcgccgacctggtgctgattggcgagatccgcgacgaggacaccgcctaccaggcctgcaaggcctctctgaccggcagcctggtgatcgccaccattcacgcgaaaagctgtcatcaggcgatcgagcgcttggtgacgctcgcccagccactggcgagaaacgcctacgacgtggttgccgaaggcatccaagctgtgatctgccaagcgctggagagcgatggttcctcgcgccgcctgaccgccgagccactgctgttcactggcgacgacggcccgtccatgcgcgacaagatccgccgaaaggaggctcatctgctgcaggacgaccaagctcgccagtcccggcaaagcctatggagataa

SEQ ID NO: 59 - DNA, 531 bp, Pseudomonas aeruginosa
atgagcactacgcaacgcacttcccgtccgacgcagggcggtttcgtttccatcgagatgatcatcgtgctgatcatcatcgccatcggggtcggcctgggcctggccgcagcggctggaatgttcagttcgtccaacgccaacgaggaacaacgcaacatcagcgtcattgcggccaacgcacgcgccctgaagacctcttcgggctacggctccagcggtaccaacctgatccccagcctgatcgcaatcaacggcgtgccgaagaacatgagtgtctcctccggcgtcgtctacaacgtctacggcggatcggtcactgtctcgtccaccggcatgggcttctcgatcaccaccagcaagttgccccaggacgcctgtatcacgctggccaccaagatcgcgaagaacaccttcgagcagaccaaaatcaacagcggatcctcgatcaccggagaagtgaccaccgcagccgcgacccaggcctgcagcagcgacagcaacagcattacctggacctatagttcgtga

SEQ ID NO: 60 - DNA, 1080 bp, Pseudomonas aeruginosa
atggggggcttctgggagcagttgcagttcgccttctacagcaagcagttcggccgcaaggaacgcctgcagttctacgaaagcatgtccaccctgctcgaaaacggggtcccgttgaaggatgctgtggcagaggtgcacaagatcttcgctcatgaggggcagcatccgtttcatccggtggccatcgccagtcgcgaagcgctgatggggctgtccaacggcaagcgtctggccaccgccatggcgctctatctccccgcccaggagcgagcgttgatcgaggccggcgagatgagcggcaacctggttcaggccatgggcgatgccgtctccctggtcgaggcccaggccaggatccgcgccaccatctggcaggcgctgctctacccctcggcgctgtccgccatgatggtgttcctgctgtgcatcgtggcctatcgcatggtccccagcctggccaggctctccgacccagtcacctggaccggcccgctcgccacgctcaacgccattgccagcttcgtcacaggacctggtatctacgttctggtcgccgtcatcaccctcacggtggtggtcatcgtcacgttgccgacctaccgctggaaaggccgggtctggctggaccggacgctgccgccctggtccatctaccgcatgctccagggcaccaccttcctgctgaacatggcggtcatgctcaacgccggcatacgcccctacgacagcctggccagcatgatcaagatctccccgccctggctgaagcagcgcttggaagctgcccgctacggcgtgggcctgggccagaacttgggtgttgcccttcgcagcgccggtcacgatttccccgaccggcaggccatccagtacctgtgcatcctcgccaaccggggaggcttctccgaggcgctggtcaagttcagccgccgctggcaggagaccagcctcaagcagatcgagctggccgccgggctggtgaagaacttcgccctgatcttcatcggcgcgctgatgatcctggtcctgctcggcgcctaccaggcacagcagctcatccaatccatgaaccactga

SEQ ID NO: 61 - DNA, 1581 bp, Pseudomonas aeruginosa
atgacgaaccttcagattgccgcgcttgcgcagccctccatggtgacccaactgctcaccgccgacggtggtgaatgggaggtatcgaagcacctgcaggaaatcatggctctggctgccgacggcacgctctatctatcggagagccaccagaacgacatacacgttctgtcgttcatcgaccgtctcgatcgccgtggcttccgataccagctcaacctcaccgacctgcagaccattcaccagctttaccgcgccgtcgccatggacggcctggtcgatagcgatggccagcgcgccacccagatgcaggagcgcgtggtcaagatcattcgtaaggccactgagctgcgcgccagtgacgtgcatttcgtcgtgagtcccgccggcaccggcagcaagatccgtttccgcgtcgacggcctgctgaagaccgtcgagcagttccgcagccaggagctgcacgaactctgtgcaaccatctaccaatccatgtgcgacgtggccgagccactgttcaagccgcaactggaccaggacgcgcggatgagccagaccttcgtcgagaagctcaacctgttcagtgcccggatcgccacccgcccgcgtgccggggggttcctgatgatcctgcgactgctctacgacgacaccggcctcgacagcctggagcagctcggctacctgcccgagcagaacgcactgttcgatcgcatgatgcgtatgccctacggcatcaacatcctgtccggccccaccgggtcaggaaagtcgatgaccttgaaggtcaccctggaaggcctcgacaagctccatggcggatccaagcacatcctgaccatcgaggatccgccggaataccgcattcgcggcgaaggcatcaaccagaccccactggtctacgacgccaccgacccagacgcagaacgccaggcctgggccgcgggcatcgccaacggcatgcgcctggatccggactacatgatgatcggcgaagtacgcgacctcttcgccgctgtcgccgcgttccgtggtgcgatgaccgggcacggcctatggtcgaccctgcacaccaacagcgcgatcggcattgtccagcgcctgaaggacctgggcgtcgaccccggcttgctgttcgatccggccctgctgaccggcctgatcaaccagagcctgctgcccaagctctgcccccactgcaaagtgcgcttccaagaccaccaagaccaactcgcgcccgacttggtcgaacgggtccgacgcttgaccgatgtttcccaggttcacgtcaaggggcctggctgccaggcctgccgtggctccggggtcaacggccgctcgatcgtcgccgaggtggttctgcccaccctcgccttcatgcgtgtgttcgccaaaggcggcccagccgaggcacgcaactactgggtcaagaccatgcagggcatcaccaagcacgcccacgccatccgccgcatcaacgagggcatgttcgacccgcagatggtcgaggatttcattgggccactcgacttcgatgagcatctgctcgacgacagcttctactcgcaggaggcgtgctga

SEQ ID NO: 62 - DNA, 534 bp, Pseudomonas aeruginosa
atgcgaactgagccgatcggcatggccgtggccgtgctcttcctcctcgcgtctggccaggcctgcgctggcaccgttggcgaacttgcggagatccaggcccaggccatcctcaccgaggccaaggtgcgcctggccacggcgcagcggcaattggaaggcaaaggcgaaaccggccaggtcgtcagcgcccaggggcagacgttcgccatgccggtgccggcggcgccgccgacgatcacgcagccggttccgccagtggtgcggaccatctacggcgccggcggcaagatgactgccacgttcttgttcccgggcgggtacgaggttgacgccgccagcggcgcggagctgcctggcaaataccgcgtcgagtcaatctcgctggaccaggtcgtgctcaccgacaaggacggcaaccgcgtgcccgtgggcttctccagcgttgcccccacccaagcctcctctacggcccaaggcgcctcggttccgccggcgctgcccggggctgtaccgcagccgttcattcagtag

SEQ ID NO: 63 - DNA, 1326 bp, Pseudomonas aeruginosa
atggagaagcctgacctcggcagccgtggaccagacgtctcgatcctgagctaccacggcaacaagttcgtcagcggcctgttctggcggccgctgtccagccagcggcagtacatgaaggaagcgcgcaagctgggcaaggaagagcatctggacatcgttgccatccgccattcaccgacggtgatccaggccggcttcgtttcgaagtcgcaaggcgcagtcaaggggatgtactccctggcctcggcgctttcaggccagttcgacggcgacttcctggcctgctggaaagtcgacgaggaccgctacgcgctggtcgccacgctcgatggcgcgattgtccccgggcaggatctggtcaccaccctcgacgaggcccgggaccgggtcaggaagctctctacgcgcggcgtgctgcgaaacgcacaggtcttcgttcccgaagggttcgatttccccgtcaaggacttcgacatcgaggaactgctcgcgccgaagcgcctgcggcgcgactaccgcctccggcaactcaccttcggcttgtccgccagggagtggacggcagtggccctgctcggttgcgtggtaggtgggtcgctaaccgcctactacctatggaatgcccaccaggaagagctcgccaggcaagccgcgctcctcgaggagcagaggcgcctcgccgagctggccgagaagaacgcccaggccaagcagccgctggacctggcgtcattgcagaagccttggacgctcatacctgacctcgaggacatgctacgcgcctgtagcaaggcaacgggggtactgtcgctgtcgatccagggctggctcttcgaatccagcaagtgcgacggcagggtcctggtcgccacctaccaccgtaccggcaacagcacagcagccgacctgacagcggccagccagcacctgttcgccgaccgccccgccttcgtcatcgacaacggcaacaccgcggccctgaaggtcgatctgaaggttgccatcggcagtgatgagccgctactgccggcggacgacgttctgcaggcgctgacgagccacctgtaccgtcaaggggtcgagcccaagctgtcgatcagccaggagacaactccgcccctccctggcgcggaagctgcgactgaacagcaagtggtgttgccttcctggaagaaattcaccttcagcgcccagacccggctcccggcagacctgaccttccaggggctgcccgctgccggtgtccgcatcaccaacctcgaaaccacgctcaaggacagccagttggactggactgtcacaggagaaatctatgcgaactga

SEQ ID NO: 64 - DNA, 1623 bp, Pseudomonas aeruginosa
atcgtgtgcgaagctacggcagattccgcgtctacgatcgcagcgcaggtgcgcaacacccgaccggatcggcgcgatacggtggtgttctccgacaaaccctgggtcagcacgaaacccctaagcgtttcgcacaccttgtccagtgactgcatcgtgacgtggcgccctgcaggcgcagcgtcgctgcaggaggccgcccaggaagtcatcaaccaatgccacatggcggtcagtatcacgcccgacgcgctgaacccggccgccttcgccgtgcaacctcagcagcgcgcgagcaacgccccgccgcccatccaaggcggccaggacatggccaccatgctgtttcctgcctccgtcgccaacggcatgtcgctcggtgccggcggcagcatggggtcgagcttcgggtcctacggtccgcggtctctgtacaacatcaaatggaacggcaaagtcagcgggttcctcgatctcatcgccgcccgagccggcgtgtcctggcgctacaacccaaccgagaaaagggtcgagttctactacctggacactcggaccttccgcatgtacgccttcgacgacgtcaacacggtggactccaccgtgcgttccggtatgacgacggccgccggcatcagcggggacggctccggatccaccggacagaatggcagctccggcatcagcggcgactccggcagcaagcagaccaccagctcggagctgaagacatcgatcctcagcgacatcgagaacagcatcaactcgatgctgacgccgagcatgggacgcatgtcgctgtcgcgtgccacgggcaccctgaccgtcaccgaccgtccagaagtcctcaaccgtgtccagcagttggtcaaccgagagaacgagagcatcaccaagcaggtgctgctgaacgtcaacgtgctctcggtcgccctgaccgacaaggatcaactggggatcgactggaacctggtctacaagtcgctcaacaacaagtggggcatcggcctgaagaacaccatgccgggcatcgatcaaagcgcgatctccggctccgtgagcatcctggataccgccaacagcgcctgggcaggatccaaggccatggtccaggcgctggcccagcagggccgcgtctcgaccgtccgatccccgtccgtgaccacgctcaacctccagtcggcgccgatccagatcggccgctacgacagctacctggcctccagccagatctccaacgtcgcccaggtcggcagtaccacctcgctgatcccgggcgccgtgaccagcggctacaacatgagcctgctgccgttcgtgatggaaagcggcgagatgctgctgaagatcaacatcaacatgacctcccggccgacgttcgaaatgcagaccagcggggactccaaagcccagttcccgagctacgacatacaactgttcgaccagaaggtacgtctgcgcagcggcgagaccttggtactctccggcttcgaccagaccaccgaggacaccaacaaggtcggcaccggcgacgctgggttcttcggtcttggcggcgggctgacccgcaataccaagcgcgaggtcatcgtggtgctgatcacccccgtcgtgctgggctga

SEQ ID NO: 65 - DNA, 1125 bp, Pseudomonas aeruginosa
atgaccaggcagttgaccactctcacgctgtgcctgctgctcgccagctgcacgacccacaaggctgagccggccaggccagccttcgacagcagccgcaatccagacctgctttctccggacctgtatccaaacggtgtgcagccggagaaagagcccgtagtgcgctatgggcgctacaccctggtcagcacccagcctgatgccggtcaacgcgacctgatggcccagatcatcgacgtaaccatcccgtcgagcatgaacccgagcgtcaaggacgccatgcagtacgtgatgagccgctcgggttactcgctgtgcccggcagacgccggtcatgtgaacatcctctacacccggccgctgccggcagctcagtacaagctcggcccgatgaccctgcgcaacaccctccaggtcctctccggcccagcctggcaggttaaggtcgacgaggtcgcgcggcaggtctgcttcgtgctgcgcccgggctatcaacttcccccggcgccgaggccgaaaccggtccagcaactgtatgcgaagcccgctgccccaactccgccggcggtagcgcaaccctcctccacggagaaagtcagcacgctggagtcgcccatcgtggtcgcctcggtgccgacaccggcgccgatcacaaccagccacgctccggccaagaagcctgaatccaccactgtgctccccccagccgcaccggccaaggatggccacccctcttctcctcccgcggcttcggcaccgaccaagcctgcggcctccgccgtgaagtccacgccgcccactccacccaccgtggcttccgccccaccggtcaaggtgctcacgccgccggaaccgagccggccgctggcacaggcctggtcagccgagacgggatcaaccctgcgcgacaccttggaagcttgggcaaagcgcgcacgctggaccgtccgctgggagccgcaggatctcaactatccgatcgaggctccactgaccttccacggctccttcgaggacgcggtatccgagctgttccccctgtatgacgctgccgaacggcccttcctggtgaacgccagccgcccgcagtccctgatcatcatcaaggagcgcaagaactga

SEQ ID NO: 66 - DNA, 327 bp, Pseudomonas aeruginosa
ttgagctttaaatactattgggctaaatttttctggggagctttcttctttgttttagtcgcttggaaaggctccgtatttccaagcctggcatcagttaaccccttggtagtggctggattcagtactatcctgtttcctttctcggtaaggcttgttgaagacttcgctttaaaatatacggaaaaagagttctgggtcacaggttttttctccgaaacccctgcaaaaacaggattgtatgcagtcttttatttggcttgttatttgttttcaattcccttggggatgatttttttattctataaatacggaaaggcctcgtag

SEQ ID NO: 67 - DNA, 1497 bp, Pseudomonas aeruginosa
atgtccaatgacaacgaagtacctggttccatggttattgtcgcacaaggtccagacgatcaatacgcatacgaggttccccctatcgatagcgcggccgttgccgggaatatgtttggcgacttgattcaaagagacatatatctacagaaaaacatttattatccagtccgatccattgttgaacaaggaacaaaagaaaagaaggagatcaacaagaaagtatctgatcaagtcgatggcttgctaaagcagatcactcaaggaaaaagggaggccacaaggcaagagcgagtcgatgtcatgtcggcagtcctgcacaagatggaatctgatcttgaaggatacaaaaagacctttaccaaaggcccattcattgactacgaaaagcagtcaagcctctccatctatgaggcctgggtcaagatctgggagaagaactcttgggaagaaagaaagaagtacccttttcagcagcttgttagagatgaactggagcgggcggttgcctactacaaacaagattcactctctgaagcggtaaaagtgctaagacaggagctcaacaagcaaaaagcgctaaaggaaaaagaggacctctctcaactggagcgggactacaaaaccagaaaggcgaatctcgagatgaaagtacaatccgagcttgatcaagcgggaagtgctttgcctccattggtcagtccaacgccagagcaatggcttgaacgtgccacaagactggttacgcaagcaattgctgataaaaagcagctgcagaccacaaacaatactcttatcaagaatgccccaacccctctagaaaagcagaaagccatctacaatggtgagctacttgtggatgagatagccagtctacagacccgcttagataagctgaacgccgaaacgacacgacgcaggacagaagcagaacgcaaggcggccgaggaacaagcgttgcaagatgctgttaaatttactgccgacttttataaggaagtaactgagaaatttggcgcacgaacatcagagatggcgcaccaactggccgaaggcgccagggggaaaaatatcaggagttcggcggaagcaatcaattcgtttgaaaaacacaaggatgcgttaaataaaaaacttagccttaaagataggcaagccattgccaaagcctttgattctctagacaagcagatgatggcgaagagccttgagaaatttagcaaaggctttggagttgtaggcaaagctattgacgccgccagcctgtaccaagagttcaagatatctacggaaaccggggactggaaaccattctttgtaaaagttgaaacactagctgctggtgcggccgccagttggcttgtgggtattgcatttgccacggcaacggccactcctataggcatcctggggttcgcactggtaatggcagttaccggggcgatgattgacgaaggccttctagaaaaagcaaacaaccttgtaatgtccatttaa

SEQ ID NO: 68 - DNA, 1974 bp, Pseudomonas aeruginosa
atgaaccgtccacgcctggttaatcgtacctccgcgacaccttcgacgcttctgcagcgggctatcttcgacggctacgacttcggcttgaagatcccctacatcgcaggcagcaatcgcgcgctgctggagctgtccggcttcttcatcagcgcccgggagcatccgttgcaccgctactggcgggtccccaaaggcaagctgctgcctgaactggacactctgtacaaccgtctcgccgagctagctggaggccttcactcccagtcctggcgggagttcagctccttggtcgaatccgcgcaggcctcgcttgaccgacaggccttcacctgggggatgctgctgcgcatcgcgcccctggccgagggcggcgtcctactgtcaggcgagttccatcctggtgttgtggcggtggctcggcggatgcgcggggtattcctgcgcccatcgagttcctggcgcatcgacaccactcccgagctgctccgaagcaacctgattctggagcttggcctcgccgaggaacaattcgagattctggatactgtccaggagctgctcagcgacggcagcttcgcgccgtcgaccgagctgcccagcatgagcatcggcggtccacagcaggaaccggcagcgccatccctggaggacgagtcagcctctgacatctacctcgccgcggtgccggagatcgagcgcaccgagtacagctcggctgatatcgaggcggcgcttcagggctactctctactggcccaccagcctgacggcatcgctcatctgctgcagagaaccagcgccttattggccgacgacatgggattgggcaagacccgccaggcggtcatcgccgcttcgatccgcgcggcgggcagaccaatcctggtcatcaccctggctaccctgctgatcaattggcagcgggagatccaggaggtctatccctcggccaccgtggccatccagcaggacaccccagaggcgcagtggatcctcgtcaactacgagcagttgagccccttcgtcgccaacgcttcgcgcttcgccgtgatggtcatcgacgaggcgcagcggatgaaggaaccgacggcgcaatgcacgcggcacggtttcgacattgccgcccaagtgccgaaccgctacctgcttaccggcacgccggtgctcaaccgcgagacagagctgcacaccctgctgcgcctctcaggccaccccatcggccaactgccgctgaaagagttctgcgaccgtttcgccggcaacccggagttccgccagagtctgcgggcggagctgggtgactggatgctgcgcaggcgcaaagatgtgctgcccagcctcaagggcaagcagcggcagttgctgaaggtggccctctccaccgaggaacgccagcaatacgacgtgctgcgcctcgaggaccgaccggtcttcgcgcgactcggcgcgctgcggcgttacctggaaacggtgaaagttcgcgtggcgatggacctgttgagcgagctcgacgcagaggacaaggtgatcctgttctgcgagttcaagccgaccgtggctgcgctgaaggaactctgcgagcaggccggacacggctgcgtcacgctggtgggcaatgactcgctcaccaagcggcagaaggcgatagatcgcttccagcaggatcccgactgccgagtgttcatctgcactacggcggccgcagggacgggcaacaacctcactgcggcgaactacgtgtttttcctcggcctgccctggactcccggtcagcaggaacaagccgaagaccgcgcgtaccgaaacggccagctccgcatggtcgtggtgaaaatcccactggtcgaggccacgatcgacgagcaactgtggcaactgctcaacgcgaaacgccaggttgcccaggacctcatcgagcccgagcaggtcgacggaaaccgcgcgcttttagccgcaagcctaactggataa

SEQ ID NO: 69 - DNA, 1890 bp, Pseudomonas aeruginosa
gtggcacctctcgacaacgccccccctagcgggccgctacaggatccatccctggcccgctacagcgagcggcagctcgccgtcgccaacacctgggcaacacatttctccctcgcagggacagctcgaaccaagttcatccgtcactacctgcgcagcacatctacgaccaggtgctggtgcatcacagtcgctgctgacaacggtgtgcgttacaccatcatgcgtgcagggccgctactccaggtattcgacggtcaactaattggtgcgtgggagtgcaagcctgcccatcgtatcccggcaagcacgccgtctcgagcaggggccttgaagctgctacagcgccttcaaaagttcgacgacgcagttgctgtactcagctcatacacaaagcgagcgcacgacctagccacacagatggccagggacgatctcggacttcaacatcgcctcgtgtatccgagccacagcaacaagcgctactacgcgccaaggcaccagttctacttgaagcagatcggagcggtcttgcgaaccttcagacaggtcctggaccaagacctgctgttcgccatccgctcggttcggtgcctctcgccccagctctacaactggctggctcaaggcgaccaggtgcgccggctgcaaatgctgaaggctcagccggtcttgacgccgctactggtggattgcgaggagggagtctggcctcacacgacgaccaacgacaacggcgagagcatccgccattaccttccttgcccctttccccagcttgacagtgaacgaccgcaggccgccgccatgccatgcgacttgtacctcgatatgggccgtattcttgggcaggtcgcggacgaaggaatttcggtcatcaactttttcgcctggctatttcaggcgccgcgggcctcgattcgatttcttagtcacgtcagtcccggccgtgcgggaggagctctcttccatcgcaaacgggaaggccgacattcgggatggcatgctctcctactggcggcatcgctaggtaaccggcggccgatcactcgcgctcaatggacagcattctatgccgcctacaatgcgatcccttggcaagttcacaacgccaagcccgactacaaccgtctcttcaacggctgcccgtcggattggcaggatccggcatggcttgcaatcactgcacggctgagagacatcaaggagttctataccgccctcgaccaggggaactcacaggttgttcggcaggcgcgcagcgccctgaaagcgtatctgggtcattgtacctaccgacaagctggcaacctggtggacgactaccaccaggtccagagggagctgcgtgccgcagtgcagagcagcctgcccgatctggtcgacaccgacgagtacaccacctgggagggaatgctgtctgtcggtcttatcgattgccctaatggactgcagatcgtcgagctccgctgtcctgccgacctatatgccgaacatatcgctctggcacattgcatcgatagctacgaccaggccgcctaccgaggagactgccgactgctctcagtacgtgaggctggtcgtccgctggcctctgccgaattggagctcaggcgtgagcatggcgagcctataggtaggccctggagtcccaagcacctttccacggtgcaactgcgcgaattcgataatgcccccgtgccgaccgactcgcctgccggccaggcataccgctggttcatggaacgaattcgctctggagccatagcgacgaacctgaactggcccgacatgaccgtccacatgacgcgcttcgccaatggtcgctggaaggcgggcctcgccgaagccacggcgaagtggctgctcactcagttggaagaccgatga

SEQ ID NO: 70 - DNA, 471 bp, Pseudomonas aeruginosa
atgcgaaaagagaatatatctgccgaaatcacagagcgagcttttgattttttctattggttctcgcgatttgagttcagcctcaaagagaatggctacttaaaaaattacaaacctggagctagggcagagccgggatgggaaaattttgtacaaaaccattctgacaaatactctctttcccaatcagccacagcactaatcgagcagagtccagagcaacaaatagtcctgcccggtagagagctgggttggcgtccggttaaattagatgaggacaaaagcgacttagctagagtcgctcgcttacttaagaccgtgcgaaacaatctatttcacggaggcaagcatggtggtgccaactgggacaacccagcgaggacaatacatcttattcttttaagtaaagctatccttgacgagtttgctgcactaggagactttgaggctgactacaagagaatttactga

SEQ ID NO: 71 - DNA, 1926 bp, Pseudomonas aeruginosa
atgcacatcgtaatcattgaagccccgggcaagctgaaaaagctgaggtcccttctcccctcgattcgtcccgacgtgacctggcaggtcgaggcgacagccggccacatcagagacctacccgttcacgggcaggatccgcagatgctcaccgtcggcgtgggccaggatttcaaaccgcactaccagatcctctcgggcaaggaaaaaaccgtcgcacggctgaaggagctgcggcagaaagccgtggaaatctacgtcgcatcggacccggatcgcgaaggcgaaagcattggctggcacatcctccaagctgccgggatcaagaactacaagcgcgttgccttcaaagaaatcacaaagtcatgcatcaccgccgaactcagctcgccgcgtcgcctggacctcccgaaggtcgcctcgcaggaatgccgtcgcgtcatcgatcgcctggtggggtatctggtcacgccagagttgcggcgcgtgatgggtaggccgaccaccgccgggcgcgtgcagtccgtcgcggtgtacctggtggtcctgcgagagcgggagatccgcgccttcacagcaatcaagcacttcggggtggaactgaccttcgtttcgcccagcgacggccgtacctggacggcggaatgggatccagtgcccgtgtttgccagcgaggagttcccgtatgtccaggatcgtcaactcgcagaactggtgggggctatacgtaatgtcatcgtcgagacctgcattgatagcgaagaaaccgatgcgcctccggcaccgttcatctcctcctcgctccagatggccgccgggaatgcgctgaagtggtcacccgacaagacgatgaaggtcgcccagcggctgtatgaacaggggctcatcacctaccaccggacggacaaccccaatatctcgaaggactcgatgccggatatccgtgctgtcgccaaagccttggggctgaagtgtgttgagcaacagcggatgttcaaagcggaccaagacgcccaggaaggccaccccgccatcacccctaccgactggatggccgctgccgccggtgaaactgctgatgagcaggcgctgtaccagctcattcgagtccgcgcgcttgccagtcagatcgaagctgccgtgtacgcagtgagaaccatcaccctcctgggcgtcggccccgacaaaaagccgctgcgcttcggcgccaaagggaagctgttgaacgtgcctggctggagaaaactgctgcagggtgatgacgccgaggagcagaagaacgaaacgccttcaaaccccatcccgatcccggcgctggagccacgccagatactcaaggtctacagcggcgaggtcctggagaagaaaaccacccctcccaagcgattcaccgacgccagcctggtgggcgagatgaagcgccgcgggattggtcggccatcctcctacgcctcgatcgtgaagaacatcatcgacaagggccaggtgcagatgaaggggcgaagcctgatccccggcgagctgggagaggccaccatcgcgctcctggagcacaacttcagcttcctcagcctcgacttcacccgcaacctcgaggtcgccttggaccggatcgccaacagcgaggacacctacatgaacgtggtccagcagttctaccagctactacagacagagctgcagacactccgcgcgctccccagcgcacaggacgaaccacgcgcaagctccaccgccagtatctcctcggcgccgaccagcgacttcctttgcggcaagtgcggtctgcccctggttcaccgcaagaaagccggcaaaggcggcttcgacttctggggttgcagcggctatcgaacaacagggtgcaaggttagctaccccaccaagagcggccggcctgacttcgacaacccgcgcgggctatag

SEQ ID NO: 72 - DNA, 234 bp, Pseudomonas aeruginosa
atggatcaaagcctttgcacatgcatgccaacgccaatcgtcaaccccaaggagctgcgactgtgccacatgttagtcggtagaactttcccgataacattgatcgcaggcgaccattggttgagctatgacggcagcgcctggtgggtcgatgcggatgagcccgcgacggaggacgaggtggcggctctgttggtcaaggctggtggtgtcactacgtgctggtgcggatag

SEQ ID NO: 73 - DNA, 246 bp, Pseudomonas aeruginosa
gtggcaagggcttccgaatcggaaatctcgaccagtacgaggtgcagtgtgtcaaagagagcgaccgataccgacaagctggacagacgacacttcaacgatccccaccggactgtacgggctattggtgctgaggccgcgcggaaagggctacgggtgttcgactgcccctacagtcatcctgcgatgcgggcgtcctggttgaaagggtttgcccaggagcagcaacagcagctcgacttctga

SEQ ID NO: 74 - DNA, 470 bp, Pseudomonas aeruginosa
atggctacccccgtcttctgggaagccaacattggctcggcgccggagcaccgcagcttccccaacggcaacaatcccccgcggcagttgctgcgactgaacgtgatgttcgacaactcgattcccgatggccaaggtggctacaaggatcgcggcggcttctggtgcagcgtcgaatggtggcatcaggatgcccagcgcttcgccgaactgttcacgaaaggtatgcgcgtcaaggtcgaaggcagggccattatggaccgctggccggacaaagagtcaggcgaagaagtccaggcgctgaaggtcgaagcctcgcgcatttccatccttccgcatcgcctggccgaggtcaccctgttgccaacccagcatcaacagtctcggaacgtcccgcagcaacctgctcagcaagatgcgcaatcgcagcaggactacgacagcgccttcgacgacgacatccccatgta

SEQ ID NO: 75 - DNA, 534 bp, Pseudomonas aeruginosa
atgcggcagctcgataaggaccagcaaggcgctctggaacaaagtgccttccgcccactgcaacaaactgccttccaggcgctgcaacacagtgcctcactaaaaggccttttaaagccttttaaaggtaatagggagctggcccagttggcggaacagtgcgaagccatggagcagggattgcttgaacttgcccagggactgctggcccaggttcgtcgcccacccttcactctactgcccacccgactcatcgagcagcgcacatccgcccgcacaacctttctccgctggcagcacattgcatcccggcggatgggcgtcggggtgtggacggaaatgctgcgccaggacaagaccccggaatacctgctgcaagacctctacgagatggagctgcagcgcatcaccctcaacatgcagatcagcctgatccactccatcggcaagcaggccgccgagtgcgcggaaaagatgggccaggccgaggccgagttcatgggccgactgcagcagagcaccaaccaccactga

SEQ ID NO: 76 - DNA, 729 bp, Pseudomonas aeruginosa
atggctgaaacccatcggcttcagatcggctctctccgcagcgatgtcgctctgacgcttcacacctatcacgccgcccgcatctggaccggccggcagaagtcggatgccaagcacagcatcctcggcctctccggcttctgcgcatacgtgaatcgcatgcaccgcggggcagcacaggacgatccgtactccgactggtggctggttcagatcgaagagaaagtcgagagctgccaagccgcactcgaggccatcgaccagcgactggatgacgtcatggccaagctgcccgcgaccctcgatatctccgagaacctgtccgttacaccggtcaaggtcccgttgttcatctccaaccctctcggcttcaaggcagtctatctcctgaccaactacgacgaactcgcccgtcgaatcctgctggcccagcacgtcgggctggtcggtcgccgcgacatggaggtctggctcgacgaaggtgcgtcggtgctgcgaagcctgtttggtctggcccagagctaccagttctcgggcgccactcgcgacgacttcgccgcaaacaatgctcgcgccgaagccgcgcggaagatgtacgagaagttcggcgagatcccgcaggacatcctggagggcactcgacgctcgaacttcgctccgccgatcacccggggccgctctgacggtgatgccgatgatgacgctgaccgtgtcgaactcgaggactga

SEQ ID NO: 77 - DNA, 240 bp, Pseudomonas aeruginosa
atgttcttgagcatggcccctttctttttggtcgttctcgttctttctgcactttttacagatgcgtggaacgaccgagaactcaggctgttgttaatgctgatcgtgttcgggtattcagtaaccgtgttgaccattacggttgagatgtatcgctttgaaatggcggaaaaagcgatgtggggagctttatgcaacaaagccaactacatgaactgccaaccagattaccaacggtag

SEQ ID NO: 78 - DNA, 276 bp, Pseudomonas aeruginosa
atgagaaagtctcggtcgggcgtcgtgttttttggtgatgcggcccgcatcactctcccaggtcctgacctccgcgccgccggcgagctgggtgattccactggaatcactccaccaggagccgacctccgcgccgccggcgagctgggtgattccactggaatcactctgccagggatccacttcggtatcggcggcaagatgggtgtttcgggccgaaacacttcgccaaagcgaggcatcaccactcacgaggaactcaaacaatgttcttga

SEQ ID NO: 79 - DNA, 1326 bp, Pseudomonas aeruginosa
atgaggctgtcgcgctttcccatttcgacactgctggactcggcctcggggcatctcgaggcccatttgtataagaagcggcttgctgccgaaagcggcgaaccgctggctcaacaatattccggcatcattttcagcggcaatcctcatgaaaccgttccacggcgcctcctcctggataagcgtcttactccgctggagcggaactgctggcaagttttccgcttgctcatcaacgacgacggactgaccgcgttcccgacatacgagcaactgcgcccctatctcggtatgcagccgggcaagatcgcctcgcgcgaaaccatcgccaaggcactcacggtccttcgtctgacccgctggctcagcctcggccgacgcctgcgcaacgacctcaacggacaggtccagggcaacgtttacatccttcacgacgagcctgtctctccagccgaagccttggagctggacaccgactacatgcagttgctgagccaatccaccggtcacggcaaccgagccatacgcgaaatcgggcagatcatctggcgggagttcagggatgatccggacgtgggtcgccgcctccctacccatctggagaagctcgagggacgcttgaaccaccagcaatgggctatcgatagtcagctcgaagcggatccagcggcagagttcggcatccgaactctgtcggatttacctcattccaccccgagttcggatgccgaactcagtgaaatcagcggcaagcaatgcgctctaccgctgagttcggataccgaaccccgacagaatccgccgagtacgcccttggttcggatgccgaactcatatagtacgtatacatacaaacaagattctgtatgtaaaaagccagtacaaccgcgagcacgcgaggaagcccatccgaactggcaggatctcctgcacgcactggaggccgagcaacggatccaggcagtaagcgcgctcagacgggtgtccgaggatcttcggctacccatcatcgagcagtggcagcaccgttgtgccggcggaacagtcagcaatccgttcggctacctcatgacgctcatccagcgtgcagtccagggcaagttcaacgcttcttgggctccggaagaaccggctgagcgaaccatccccgcaacggaacgccccattcgtgctccggcaccatcaagccccatagcgcctacacagcctcaggtccagccccggggggatacccggacagggagcgaggtcctcagccggctcaaggacctcattcggcccaggcacggatcgagcgtgccatccgagcggggtgatgattcatga

SEQ ID NO: 80 - DNA, 768 bp, Pseudomonas aeruginosa
atgtcgaagtcgacgatcaatgaagcggtcctgacgcaggtgctcaaccacctgcgcaacggccagctcaggcgttgtgccgagatggggctgcggccggagattctggctcagctccaacagcctgccgtcatgagcatcctgaccaataccccggtttcctgggtagatgtcagagtgaacatcgacgtcatggagaaaatcctggccacagccgagcgcagcgcgcaggaagacctgcagatcgaacgcgcactgaagctgggagccaccacaacgatgatccagagctttttcggtctgtcgccggaggacaccgccaccaagcgcttgatgctggagatccacccgcgccgcggtcgctggcggcagctcgatgaacagatcgagcgccagatatggttccgctgggagcacctgatgcaggaaaatcaggtccgccttgaagacagcatggagttgctggacatcgcgatgatcctcacagaggaaatcaacgccggaatcgaacaagacagtccagaattcatcagcctcgccattgtttggtctctcatccagagctggttgaaagacgggctctatccgtctggcaaatcgagccagagccaggcgggcctgcaaaagtcccaatccactctttacctcgctagcgtcagctcacacctgccccactctgccccatccgcaacaacgcaggtgaacgctgagacagaacgtcaacaactactgaacctggttcagtcggaaggcgacacagcaccatga

SEQ ID NO: 81 - DNA, 1740 bp, Pseudomonas aeruginosa
atgagtatggccaagatcaacccgcaagatctgaaagaccggctacttgcccctggttttaccgcaccgcccaaggttctggagcagttgtcggacccgatcagcgacacgcccatgaggctgacactccacgacgtcctcccctggcacgataacccccggaccactcgaaacccgaaatacgatgagctgaaagaatcgatccgacatcgaggcctcgatacgccgccaccagtgactcgacgccctggagaggacaaataccgcattcgcaacggcggaaacactcgcctggaaattctcaacgacctctacaaagagaccggagacgagcgctatttcagcttcgactgcctgttcaagccctgggacaagcagcgcggcgaaatcatcgcgctgaccggtcatttggccgagaacgatctgaagggcgacctcaagttcatcgagcgcgcggttggggtgcagaaggcgaaatttctttacgaacaagagaacggcggtgaaagcatttcccagcgcgagttggcacgtcggctaaaagcggacggctaccctgtatctcaatcccatatcagtaagatgttagacactattgaggtattggcgccggcgattcctgtgatgctgtattcagggctcggtaaaccgcaaatcgagaaactcctgtcactcagaaagtcggcatcctcctgctgggcacgtctatacgctggtgaaggggttgacttcgaaatgctgttccaggacaccctggcaatcttcgacagtagccctgacgaattcattttcgagcgtttccaggacgaactcatcgaccaaatgaagcgccccctgggcctgcgttatgaccaaatcctgctcgagattaccaacgggcagcaggagcaacgccgcggcactctggtcgacctgcccacacctgccgcaccacctcaactcccaccaattgggcaggaaaaccctgctgcgtcgtctactggacaagcacaaacacagagccccgccgcagatccccaaacgtccaggacaaggagcaacccgggtaatcccctccccccgccggctccgccaccacctgtccaacaaaagcaattgcccgatgaggagcgtgcggcggtcttggcaggccatatcgtgagcccggtatcgactaagatccagcagactcgccaacggctggccggcctcgagggggaacatctacctgtcttcgatgaaacagctctgcaggcaatcccagtgcaagtcggtggcctgcacccgatcaccgatctctggtacatcgagcggtcgatcgatacccccgagatcctgcgacagcacatcgctgatctggctgaagagatcgctctgcatgtcggcgccccaggcgagatcgtcaggattcagggcggtgtgggttacacgtatcgcgagcccaatgaagaccatgagattactgattcagcgctgcacctcatgacgctgcttcaagcggtcagcgggcaggtccaagtcgttctgaacactcacgatcaacagacctgccgcgatgcactgggtgaattccagttctcagctggcctcgctcagttgctgctgggccaacccaccacaagtgacaagccatcctgccaggcaggccgtctcaatgacgaagccctggtgaaactgttccggatcattcgtcttgcccgacgcctggttgaccttgagctgccgccggccgcctccgagcaagcagctactgaccagtga

SEQ ID NO: 82 - DNA, 255 bp, Pseudomonas aeruginosa
atgaccatggcccgagaaaccgaagataagttcgttgtccgtatgcccttgggcttgcgcgatcagctaaagcaaaaagccgcggataaccaccgttcggccaacagcgagatcgtctaccgactggagcgcagcaacgcgctcgaagaagaactcgcgcgagcaaaccgaatggtcgacgaactcttcgccaagaaccagcgcctgcaggctgagctggcggcggcgaacacgcctcaggtggcggaggcatga

SEQ ID NO: 83 - DNA, 1017 bp, Pseudomonas aeruginosa
atgcctatcaaacacgccatcgtccacctgatcgagaagaagcccgacggcaccccggccgtgctccacgcgcgcgacgccgagctgggcgactcccaggccatcgagaacctgctggccgacctcaacgaaagctacaacgccaagaacaaggcctggggcttcttccagggcgagtccggggcctacccgttcagcggctggctcggcgagtacctggagggcgaccgcgacttcgtcggcttcagccgcgaagcggtcgagcacctgcaaaagctgatggaggagtccaatctcttcaccggcggccacgtcctgttcgcccactaccagcaaggcatgaccgactacctggcgatcgccctgctgcaccacagcgaaggcgtggcggtgaacgagtcgctggaggtcaccccgtcgcgccacctggacctcggccagttgcacctggccgcgcggatcaacatttccgaatggcgcaacaacaagcagtcgaagcagtacatctcgttcatcaagggcaagggcgggaggaaggtctccgactatttccgcgacttcatcggctgccaggaaggggtggattcgccgagcgagacgcgcaccctgctgaaagccttcagcgatttcgtggaaagcgaggacatggccgaggaacaggcccgcgagaagaccgagacgctggtcgactacgccacctcgcaggcgcgcatcggcgagccgatgaccctcgacgcgctttcggaactgatggacgaccagcaaccgcgggcgttctacgactacatccgtaacaaggactacggcctgtcgccggaaatcccggcggacaagcgcaccctcaaccagttccgccgcttcaccggccgcgccgaaggcctgtcgatcagcttcgaggcgcacctgctgggctccaggatcgagtacgacgaggagcgcgacacgctgcagatcagcagcctccccactcaactccgcgaccagctcaagcggcgcaaggcccaaattggagaatga

SEQ ID NO: 84 - DNA, 234 bp, Pseudomonas aeruginosa
atgcgtagtttccttcgcggcgcccgggaaagcgttcgccggctggtggccttcgctcaagcagaaggctggagcgtcgaccgctccgcaggcggccacttgaagctcagcaagatcggctgcgcctcgatcttcatttcttccacgccaagcgacgcacgcggcgagctcaatgcccgcgccctgctccgtcgagccgacaggcagcgttccctgaaccaggagtctttctga

SEQ ID NO: 85 - DNA, 495 bp, Pseudomonas aeruginosa
atgcctgacgtcacagcctaccggccgctcgagcacttccagaaagtcgagctgatgcttgagctcaagttgcgtgaaggtccttcgtggatctgtctgaactgcggctatcacctggatggcagcggcgcacagccctgccctgactgcggaaagtcgcgctactggaccagcggttggagtgtaggtcgtggccatcgcttctcggcagcaagggaagagtgggaaaaccgcctcaggacacggtcgcggtcacctgtcgcgtcaacggcaccagtagcaactgacgacgtatgcactcaactgcgcacagaggtccgcatgctgcgttccgcgcatgacgacctggcctgcagccggcagagcgatcgtcgcagccttcaggcgctggtgaaacgtctcctggatgccgccgccaccgatagccttccccgctcccttgcagagatggagacctggctgcagctcaacagcgaggagaccacgaatgcgtag

SEQ ID NO: 86 - DNA, 258 bp, Pseudomonas aeruginosa
atgaaggcgtcccagacctatcagtgcatcgtcaagttcgatggcgccggtttctggaccaataccattcagaagcagcgtgcgacctgcacctggagcgacaaggtggcagcctcccgccttgccgaacgactgtttggcgaggacaacgcatacatcacccgtatgccggtacaggcaggcgaccacgaaaagcgcatcgagagccgctgggcgctgtcctgtagaaatcccaaggaggtagcgcgcgatgcctga

SEQ ID NO: 87 - DNA, 528 bp, Pseudomonas aeruginosa
atgaacactgaagcccgctttccgagtatccacgcctcggccgcgttcaccgactcggcagtggttcatgccaatcacgttggggtcaaccccatcgagctggacgccctcagccaagtgatctcgcgcctttcgcgggacgagagcacggtcgcacccagttcgatggagcgagagcttcgtgagctggaggaactggggtacatcgaaatctcgaccacccaggccgggactctggtggtcactacgcgcgctccggggcaattgctttcggcttacttctggtcggtatggatcccgcgacacctgttcagctgctcgctgaaagtgagcctggtgccgcacctctgctgcggcactcaggactcccagcacctcaccgccgtgttccgcattgcaggcagcaaggacgccgcgcgcgagttcctgcatcagttggccaacaactatcccgggcatgagccggagttgcccgaactggtggccgttcaggtcggtgatgcactcagcaaggaggccgagtcatga

SEQ ID NO: 88 - DNA, 1363 bp, Pseudomonas aeruginosa
gtttctgcagatcagccgggaggactcgaagtgagtgttctggaacttacgccgccgcactccgtcgaggcggagcaaggggtactcggcggcctgatgctggacaacgcggcatgggacattgtcggcgatcagttgcagaaggaggacttcttccggcatgagcatcggctgatcttcaccgccatcagcgagttggccgcgaaggatgctccgtttgatgtcgtgactgtgtcggaagcgatcgaagaccttccagaagctggcgggctggcctacctcggccagctcgccgacaacacgccctccgtggccaatatcgaggcttacgcgcagatcgttcgcgatcgggcacacctgcggcagctgatgtctctcgggcaccactgcaccaggaccgcctcgaaccaccaggcaaatccctctgaggttcaggaggagattgagcagaagctgttcggcccttggccaggaccaccacaacgccgatttcgtcgatatcaacaagagtctcacgaagatcgtcgacaccatcgattaccgcttcaacaacaacgtgacggtaacgggggtcccgactggcctgaaggatctcgacgcactcaccggcggactacagaagtcggatctcatcatcgtcggtgcccgccccgcgatgggcaaaacgtcgtttgccctcaacctggtcgacaccgcgctccagagcgaccaacagaagtctgttcaggtgtacagcatggagatgccggcagagcagttgctgttcaggcttgccgccctgttcggccacctggacctgggcaagctgatgaagggccaactgcaagaagaggattggcccagactgtctggcgcgatccagcgcataaacgactatggcagccggctggtcatcaacgatcagggcaacctcacgccgacagagctgcgcgccaaggttcgccgggcggccaggaagtacggacaccccgcgctgatattggtcgactacctgcaactgatgagttgcccaggcctggagaatcgagccaccgagatctcggaaatctcccgctcgctgaaagcgctggccaaggagatggactgtcccgtcgtagctctatcccagctaaatcgcggcctagagaaccggacgaacaagcgaccgaactgcgcggacctacgagagagcggcgcaatcgagcaggacgcggacgtgatcatgttcgtgtaccgcgacgaggtctaccaccccaacaccgaggccaagggcatcgccgaaatcatcatcggcaagtatcgcaacggtccgatcggcaccgtccacaccgccttcatcgccaaccagacccgctttgccgacctggcgccggggacctggcaa

SEQ ID NO: 89 - DNA, 708 bp, Pseudomonas aeruginosa
atgactcgctctgctctctcgaccatcgcctacgaggccctggtgcgtgcccgccgcaaattcagcaaccgagaggagcgctgcatccgcgaaacctggaccgccgaacaggaactggtgctgctgcgcctgtatccggatatgccgaacgaggtcctggcagccaggttgaacaaaacgctccagcagatctgctccagagcgtatcggctcgggctgaaaaaaagccctgagttctccaagaagatccggcaggactggggcagcgcaactcggttcaagaagggaaacaccccatggaactgcggcatgaaggggctgcccgcgcgaggacgcgcaccagaaacgcagttcaagaaggggcaaaagccccacacatggctcccagtcggcagcacgcgggtcagcgctgatggctacctgcaacgaaagatctcggataccggctatcccccccgggactggaagggcatccacatcctgctctgggaagaacacttcggccccatcccaaccggccattgcgtctgcttcaaggacaacaacaagcagaacgtcgtcatcgacaacctggagctcatcacccgggccgaacgcatgcgccgcaactccatccatcgctatccacctgagctgaagagcgcaatccgcgtcatcagcaagctcaaacgcaccattcaggaggtcgagcatgaagaacaagattga

SEQ ID NO: 90 - DNA, 702 bp, Pseudomonas aeruginosa
atggacaagcaaaaagtcctcgccaaggtcgagaagctgatggccctggcgaatgccaagggggccacgccgaacgaggcggaaaccgcattgcgccaggccgcgatcctgaagcggcagttcgacctcagcgatgcggagatctcggcccacacggtggaaaccgcgtgcgttcccactcgaaccaggcgctctcctgccccatggctgcatgaactggccgggatctgcgccagttccttcggctgcgactacctggcggcatacgcgatgccagcgggctggacgttcaagttcatgggccgagggatcggccctgagctggccgctcacgcctactctacgctccaccaccaactggtggcagcgcgctcggctcatgtcgcccaacagaagcgctgcaagctgtcgaccaagcgtcgtcgcagcaagctcttcgtcgaaggctggcttctcgcagtgcgttcgctggtacgtgaatttgctggcaggccggacgagtcgactcaagcagccatcaaggcctacctcgaactacaccatccggcgttgaagtacctggagccggcggcgcttacgaaggcccttgcctatgaccaggcctcgctgcaagcaggctgggagcacggcaaaaacactcgcctgcaccgcggtgtcagccggcgagttcagggcgcgctcgagcagggaggttcccaatga

SEQ ID NO: 91 - DNA, 687 bp, Pseudomonas aeruginosa
atgagtgaccccaagctcaagccctgcccgctctgcggcagcacgaacattcgaatgctggaacccgagctgctcgacaccgatgcctggaactgtgccattgaatgcctggactgccaggttcacatcgggccgtcctactgcgagccagacccggtaacagcgaggtattcagcacagatcgactggaatagacgcccaagcgcaaaaaaccacgcggacgagcgtgagcagttcttgatggccaacctgctcgccgccctggaggtcgcactgggcgacgtagcagccctggctattgtcgatcgggtaagacaggccacagaccgaatttacccaacttcgaacctctcccctgttccgcaggcctggctcgatgtacaggccgagcgccggcgccagatcaccgtcgaaggtttcgataccagcaacgacgacgctagcgctggcctgatcgccctggcggccggctgctacgcgctccatgccggcggcatcggcaccgactggccgggcggcattcggaatggctctgcactgttctggccctgggacgaagagtggtggaagcctaagtcggcgcgcgagaacctggtacgcgccggcgccctagtgctggccgagatcgagcgcctggaccgctccgccaccgagcagggctcaaccatctgcaaggggggcgcgtaa

SEQ ID NO: 92 - DNA, 498 bp, Pseudomonas aeruginosa
atgaacctccagaaccgcaacaacctcctactgagcttgatcgccgagacccagttcgacgcctacgtgcaaggctacatggccaaagcaggcgctgccgccggtgcttccgagaatctgcaaatcgaggctgaaggtgctgcgatgttgcagggcctggtcgctccggttcgcgctcagcagcgtgcctgtggacagtccctgcagaacgcactgctccaaatcgcccacgacctactgttgcagacgaaatcgcaactggccatcgcggccaatgccagttcgatccaagtgatccagcgggacatgaacagggcgatctggaacatagctactgccatcgatcacctggccgagttcgcccaaccctcgcaggacactgtgagggtcatcgaacggctgatgctcttcgtcggcagctcatcaagcactgaaggccagcaactggccgccgaggcaaatgcggtgctcggcatgagcgtgggaggcctggcatga

SEQ ID NO: 93 - DNA, 681 bp, Pseudomonas aeruginosa
ctgaacaagttcggcagcgccgccgaccttcggagccagcaggccaaattgaccggcgctacgcgagaaatacgcaagctgactggtggcggtatcgacctgttcgggaagctgggttgctacttgagcttcgaacaaaagcagctcctacaagacgcagcgcgcttgctcgactcggtgaacaagcagatcgagcatgcgaaggaaaagcgtgatcgctacgagaaaaaagccaagaagcggcgcgagctacgtgagcgcctggccaagcaactggtcgcctcgaactacccgcttccgggaaatacgctcgaagatcggctggaaatcctgcagatcgcgttgatctacaaccgggccagggtgttcgatcacctgtactccacgcaccagctccactcaaaactcaaacgctggctggagcgtccaaagcagctcatcggatggcgcagtgaagccgagtatttcgctagtcaggtggggagcctgcgatgtgacttcattagccatctgactaacgaaatcgcgtacgacgatggcagtgaagtcgaggagcgcctgcgcgtcatcaagcagaaggtcgctgactgcaccgcacagatcgctctgaccagcgaggagcaggaaacccttcggctctggacagacgctctgcaatcggctccggagggcctcatatga

SEQ ID NO: 94 - DNA, 930 bp, Pseudomonas aeruginosa
atgaatgcgaaagcgacttcggttgtatccaccaagggtggtgtaggaaaatccaccaccgccgccaacctcggtgcattttgcgccgatgcaggcatacgaaccctcctcatcgatctggaccccgtccagccctccctatcctcgtactacgagctgccggaagttgcccagggcggcatttacgacctgctcgccgccaacataacggacccggcgaggatcatctccaggacgattatccccaatctggacgtcgtgatttccaacgaccagaacaatcagctcaacaacctactgctccaggcgcccgatggccggctacgcctggcgaacctgatgcccgctctgaaagaaggctacgacctggtgctgatcgacacccagggtgcgcgctcagctttgctcgaaatggttgtgcttgcatcggacctggttgtttcccccctccaacccaacatgcttaccgcccgtgagttcaaccgcggcaccatgcaaatgctcgacggcctacgcccctatgagcgtctcggcatgcggatccccaatgttcagatcgtcatcaactgcctggaccagaccaatgactcccgggcaattcacgagaatgtgcgtgccatcttcgatgagcatcaggacatttctgtgctcgaaacgactgtcccggatgccgtcgtgtttcgcaacgcagcatcgcgcgggctaccagcgcaccgcctcgaaacgcggcaaccctccaatcgcacatcagcgcccgcgctggaaatcattcgaaacctggccatcgaggtctttcccgagtggactgaccgcttcctggcgctgacgccgggaggcggttgcagcactggtcaagggagggcgctgacatggcgaagactcctatcacccaagcccgcgacgtcgacgcggaacttgtgctggaactga

SEQ ID NO: 95 - DNA, 322 bp, Pseudomonas aeruginosa
atggggatctaccgcccgaagcagtctcgcctagcgataccgatactgaggggccggctaccggacgaaaggtagctgcgcctcccagcagttcgctaggcctgtaggaaaaatctggaattaccgagagcgcctggattccagcgccggcatgctggcagagccccgcaatttcaaggccgaaaccgcagtaccctctgtaatcgctgattacgtcgagggcacattgctacgcctgcagaatggtttcagggcctgaaaaacagaaaagcccacctaaataggcgggctattccatattgacatcacgtcaatgcgggcc

SEQ ID NO: 96 - DNA, 1281 bp, Pseudomonas aeruginosa
atgacgccgcagcagctcaccgaggagtacatcttcgcgcacgatctccgagaagccagcgcgaagatctaccgcgccgcgaccaaggcgctgctcaagcacttcggccctacggcaaccgtacaggaggtggaccacaggtctgtgctgggatggcggcgcaaggtcctggaacaaggcctgtcgaagcggagctggaacacgtattcgaatcatctgcgaacgatctggggctatgccatcgagcacgagctggtgacacactcccaagtcaacccgttcagaaagaccaccgtcatcccccccaggcgagcaagcaaaaccgtcgcagccgaagccatcctgcgcgcccgcaattggctcaacatgcaggtcggcgccgagcgctgcactggcgatcgcgcacgcatcactcccgcctggttctggctttgcacgtttgaggtcttctacttcaccggcatccggttgaatgcgctgttgtgcatccgcaagcgcgacatcgactgggaaaatcaactgatcctcatccgcggcgagacagagaaaactcataaagagttcgtagtgccaataacggaggggcttgtgcctcacctatcgcggctcctgcaggaggccgatagagccggattcgccgatgacgaccagttgttcaacgtcaaccggttctcaccgcactacaagagcaaggtgatgaactccgaccaggtcgaagccatgtaccggaagttgaccgagaaggttggggtgcggatgactccgcaccgtttccggcacaccctggccaccgacttgatgaaggcacccgagcggaacatccacctcacgaagtgcctgctcaaccactcgaatatccagaccaccatgagctacatcgaggccgactacgaccacatgcgtgccgtgctgcatgccagaagcctggcccaaggagcgctggagaacgtcaggaaggtggattacagcggctccccgcaagcctctgccaaaccgaagccatgcgggcaacctctcgctcgaatgggtgaagcgccgccacaggaggctaggacagaacctgcagaaccaagggagcacacaccagggacaggcattcagggagatgcaaccgcgtgggaagaagcgctaccacagccacctgacaccttcgagcaaagcgtgctgttcactctgatggctcaacacctatcgaaccgtgccgccacggcctccgcggcttccaccgcaacaagcggatctggaggatggggatctaccgcccgaagcagtctcgcctag

SEQ ID NO: 97 - DNA, 378 bp, Pseudomonas aeruginosa
atgaaatctggtatcgcgacccgtcgcctgttcatcaacgacaccaaggctttggtgcataccgtcgacgggaccgccatgctggtcacgccaggaatcttcaagcgttatgtccaggagcatccggaggttgaaaagctggcccaggccaaggagaccgccggctggaagctggtgcagcgcgcgttcgagaaacagggtcttcaccgaaagaccagtaagaacctgaatatctggaccatcaaggtttctggtcctcgcaagacgaaagagctcaaggcctacctgctccaggatcccaaattgctgttccctgtgcagcctctggacaacccaagcctcacggtcatcaccgatgccgaaggaggtgtggaatga

SEQ ID NO: 98 - DNA, 843 bp, Pseudomonas aeruginosa
atagaccagttgagtgagcaggagtcggtggaagtggtctgctcagctttcgatgtggcgcggtcttgctactacgtccaccgtcttcgacggcggcgtgtcgatgctcgccgcgtggcgctacgcagccaagtcaaccagttgttcagccagagtcggggctcggccggcagccgcagcattctgggcatgctgcgcgaagagggcgtgaccatcggccgtttccgagtgcgtcggttgatgcgtgagctgggcctggtcagcaagcaaccgggctcgcacgcctacaaacaggccacggttgagcggccggatatcccgaatcggctgaaccgcgaattcgcgaccgagcatcccatacaggtgtggtgtggcgacatcacctacgtctgggcgcaaggccgttggcactacctggccgcggtgctggatctgctgatcggctgggcgttctcggccaagccggatgccgaactggtgatcaaggccctggacatggcctacgaacagcgcggcaggccacagcaggtgctgttccattcagaccagggcagccagtacgccagccgcctgtttcggcaacggctctggcgctatcggatgcagcagagcatgagccgtcgggggaattgctgggataactcgccgatggagcgcctgttccgcagtctgaagtcggagtgggtcccgtcaacgggttacctgacggcgcaggaggcccaacgggacatcagtcattacttgatgcaccgctacaactggatcaggccgcatcaattcaacgacgggttaccacctgcggtggccgaagaaaaactcaacccactgtccgggatgggttga

SEQ ID NO: 99 - DNA, 285 bp, Pseudomonas aeruginosa
atgttgtatttttcttgcagtatgaagatgggtggttgggtcggatataggtacttctctctattttctttaattgctctcatctatgggtgtgtcggtggtggaggtggatcggatgagattgggcagcactgctttgagagagagcaaaagctttccggagttaatgataatgaagaggggagtgtgaggttgaatcggctgaactgcgatccaattgaaggtcgtgttcttgaatcagagaagctgataagaaagccgcccaatgagctgggtattcactga

SEQ ID NO: 100 - DNA, 624 bp, Pseudomonas aeruginosa
atgaaaaaatcacttgttatgtcggctgtgcttttggtggctagcaatttcgcgtgtgctgatgagggctcaaatgatggaagtgagatatgtcgggcgcagggtggagttgaaataacaagtctgggggaagtctcaaagggtgtggatgttgaagatgttgtagtttgttcgattcttccaagtaatatgaagtcgagtcaaagagcgcctacactccctcctctgcaaaggatgatcatttcggcaatgccttcaccaggaacggtcactgtttctgccagcggagataggaaatttacaacatcttgccgggcaaatctttatgctccacgttatgccaatttctatccagacggtgttagcaggggaacatcagatctacgatgtgttggttacaatacacccgggaattcatctcaagggtgtaatgtgtcatgggacggcccgaccgacattcaattgggtgttgagccatatggcggatctgttgttgtaaactacagttgcactgcattcaaaacaacgattccagtgataatgagctacagttatcgtgatgggcgggcagtgtatggcgaggtccagaatgtgtcaggaataataaatgtggttttgaactaa

SEQ ID NO: 101 - DNA, 318 bp, Pseudomonas aeruginosa
atgcttattaaaattcttcgaattatattcttgttgcctatagttggtttggcacagcaggctgctgcctccccgcccgcagagtcacactcggaacaatctgaatcttcgtgtatcgatgtccaagtcaatggagcacgtagcctgtcttataactgcatggctcagcaaatgactccacccaaagaggatcctcggcgtcggaaccctaccttgaactccacattagcgtctgaacgcgccactcgcctgccacccacacagacaggactttttaccagccttcatcaacgtgccatatcgaactcgaaagactag

SEQ ID NO: 102 - DNA, 204 bp, Pseudomonas aeruginosa
gtgagtagtactaagagtaagccgatagccagggggcgtggtggcccatttggggaagtgatgaagaggtgcgggcttgtaccggttcgaggaaggaatagacagcagacaggatcgcttgcgatggggcagcaggaaaccatcagcccgtccgtatccagaactgctgcttgcagcgttaggggtgactccctcatgccctag

SEQ ID NO: 103 - DNA, 219 bp, Pseudomonas aeruginosa
atggaacgcttgctcgagagcatttacatcaatgcccggccggcgatggagttgaggcttagcctcaccagctccggccgcaagagaatggtaaagattgtggatggggaggaggtcgaggttctgccaggtgaagtgcagggcatcctggaggcccaaaagagggatgttggaatcctcgccgacttcttagccaagagtctcgtggcgcgacgctag

SEQ ID NO: 104 - DNA, 450 bp, Pseudomonas aeruginosa
atggaatgccacgttcgtcccgccacgagcagagatgcagcagcgataagctgcgtagttatagccgccctgcgtgagtcaaattcacaggactatccgcctgatgtgatcgctcaggttgagcagagcttttctcctgaagccatcaccacacagcttacgaagcgtagggtcttcgtagccttattgggcgaaaacattattggcactgccggtctcgacggtgacgtcgtcagaagtgttttcgttgacccagctcaccagaaaggcggtatcgggcggcatttgatggatgtcattcatacaactgctgccagcgcgggagttggagctgtacgtgtgccatcgtcgattacagctgaaaggttttataccgcattgggttatcagaaaatccgcgacgagtttcatggggcggagcgcaccatcgttatggagaagcggctgtag

SEQ ID NO: 105 - DNA, 1101 bp, Pseudomonas aeruginosa
ttgtggttgacctgcacgccacagcaggatgtgcaggcggcgttagctacagcgtcgatactcctgggccagttccaccagttgggcgtgcagctcggtcggtacactagcctcgacccgcttgaggaagtcgagaagaacgcttctgcactgccgtctcctgcttggaaaacggattctactaagttcagcgtggtactgaaatcggggggcaggtcaatcgacaaaggtatcccgaccgcaggtttgttggcccacgtgatggtggccaagtttgccgatcacttgccgctgtaccggcaggagaaaatctttggccgcgccgggctggcaattgctcgctcgaccctggcgcagtgggtcggacaaaccggcgtgcggcttcagccactggtcgatgcactgcgtgaagccgtgctgaaccagggcgtgatccacgctgatgaaacaccggtgcaaatgcttgcgccaggcgagaagaaaacccaccgggcctatgtctgggcgtacagcacgacgccgttttcagggctcaaagcggtggtttacgacttcagcccaagccgtgctggcgaacatgcgcgcaacttcctgggtgactggaacggcaagctggtctgcgacgacttcgctggctacaaagccggtttcgaacaaggcatcactgaaatcggctgcatggcccacgcccggcgcaagttctttgatttgcacgtggcgaacaaaagtcagctggctgaacaggccctgcactcgatcagcggcttgtacgaggtcgaacgtcaggcgcgggacatgagtgatgaagagcgctggcgaatacgacaagaattggcggtgccgatcctcaaaaaactgcatgactggatgttggctcagcgagacctggtgcccaatggatcagccacggccaaagccctcgattacagcctgaaacgctgggtagcgctgacgcgctacctggacgatggggctgtgcccatcgataacaatcaggtcgagaaccaaatacggccatgggcgctcgggcgttcgaactggctgtttgccgggtcgctgcgcagtggtaaacgggcggctgcaatcatgagcctgatctag

SEQ ID NO: 106 - DNA, 570 bp, Pseudomonas aeruginosa
atggtgaggcggcggagggtcgcggtggcgcgcgaatgcctgagcctgtcgagcgcaccgaaccaggtcttgtcgatggatttcgtcttcgacgcgctcagcactgggcgacggatcaaatgcctgacggtggtcgatgacttcaccaaggtgtcggtcgacatcttggtggagtacggtatcagcggttttcgtgtcacgcgggcgctggacgagatggcgcggtttcgtggctacccgcaggcgatccgcaccgaccagggccccgagttcaccggcaaggcgcttgatcagtgggcctgtcagcgtgacatcaagttgaagctgattcagcctggccagcccacgcagagcgccttcatcgagtcattcaacggcaagttccggggcgaatgcctcaatgagcactgctcgctggtcgaagccagaatccgtatcgcggcttggcgggattacaacgagcaccgaccacacagcgccattggcaatctctccccggcagagcttgctgcgaagtggcgaaccaaccagcagcagctgaagcgggaaaagttgatatcaaccccatag

SEQ ID NO: 107 - DNA, 2066 bp, Pseudomonas aeruginosa
atgcatatccaatcgttgggggctactgcctcctcgctgaatcaggagcctgtcgaaaccccgtcgcaggcagcgcataagtccgccagcttgcgtcaggaaccttcagggcaaggtctcggggttgccctaaagagcacgccgggaatactttccgggaagttgccggaaagcgttagcgacgtgcgtttcagcagtccccaagggcaaggggagtcccgtactctgactgactcggcagggccgcggcagatcactctgcgccagtttgagaacggagtcaccgagctacagctcagtcggccaccattgaccagtctggtcctaagcggcggtggtgccaaaggtgcggcatacccgggagcaatgctggcgctagaagagaaaggcatgctcgatggcatccgcagcatgtccggttcgtccgctggcggcatcaccgccgcccttttggcctcaggtatgagcccggcggcgttcaagaccctttccgacaagatggatcttatttcgctgctcgacagctcgaacaagaagctgaagctgttccaacacattagcagcgagatcggcgcatcgctgaaaaagggcttgggcaacaagatcggcggcttctctgagttgctgctcaatgtactcccacgcatagattcgcgggctgagcccctagaacgcctattgcgcgacgagacacgcaaggccgtgctcggacagatcgctacgcatccagaggttgcacgccagccgaccgttgccgccatcgccagcagattgcagtccggctccggagtcacctttggcgatctagatcggttgagtgcttacattccccagattaagacgctgaacatcacaggtacggccatgttcgaggggcgtccgcaattagtggtgttcaatgccagccacacaccggatctggaggtcgcccaggcggcacatatctccggttccttcccaggagtgttccagaaggtcagcttgagtgatcagccgtaccaggccggcgtagagtggacagaattccaggatggcggggtgatgattaacgtgccggtccctgagatgatcgacaagaattttgacagcgggccactgcggcgcaacgacaacctgatccttgagttcgagggcgaagctggggaggtagcgcccgaccgaggtactaggggcggcgcgctcaagggctgggtcgtcggggtgcctgccctgcaggcgcgcgaaatgctgcagctcgagggcctggaggaattgcgcgagcaaaccgttgtggtgccgttgaagagcgagcgcggtgatttcagtggcatgctcggtggcaccttgaacttcaccatgccggacgagatcaaggcgcatcttcaggagcgcctccaggagcgagtcggtgaacatctggagaaacgtcttcaggcttcagagcgtcataccttcgcttctctcgacgaggcgctgctggcacttgatgacagtatgctcaccagtgttgctcaacagaacccggagatcacagacggggcggtggcttttcgccagaaggcgcgggatgcgttcaccgagctgactgtcgctatcgttagcgccaatggcttggcgggtaggctcaagttggacgaggctatgcgctccgctcttcagcgactcgatgcgctggcagatactccggaacgcctagcatggttggcagctgagttgaaccatgctgataacgttgatcatcagcagttactcgatgccatgcgcgggcagacggtgcagtcgccggtgctcgccgctgcgttagcagaggcgcagcgccgcaaagtggcggttattgccgagaacattcgtaaggaagttatcttcccctctctgtatcgccctggccagccggattccaacgtagctctgttacgtcgggcggaggagcagctacggcatgccaccagtccggcggaaatcaatcaagcgctgaacgatatcgtcgacaactactcggcacgaggcttcctgcgtttcggcaaacccttgagttcgactaccgttgagatggctaaggcttggcggaataaggagttcacatgatt

SEQ ID NO: 108 - DNA, 414 bp, Pseudomonas aeruginosa
atgattgatacatggctggcacagtggggcttgagacttccctcgagcaacgatgccacgttgcggctgcaaccggcagagggaccggaactggttatggagcgcctcgagggcggttggcttttcgtcgtcgagttgggacttgtgccttcagggttaccgctgggtgtgatcttgcaattgttacaagtgaactctccattctcatccttggcaccggtgaaacttgcggcggacgatgccggtagacttgtgctctgggctgaggcacgtgatggcgttgacgatgtggatgcactgaaccgcttgcacgataggctgcgggaaggacattcacgattagtgccattgctagagcccacgggtgagttggttccagctcagatacaaaccagcgcgttagtgttcgtttga

SEQ ID NO: 109 - DNA, 514 bp, Pseudomonas aeruginosa
aattcgcggccgcgtgtcgacgaccaaacctgtgataacctgtctcaaaaccctcctcatcatctactccttcgtcttctggatcactggggtgatcctgctggctgttggagtctggggcaaacttactctgggcacctatatctcccttattgccgagaactccacaaatgctccctatgtgctcatcggaactggcaccactattgttgtctttggcctgtttggatgctttgctacatgtcgtggtagcccatggatgctgaaactgtatgccatgtttctgtccctggtgttcctggctgagctcgtagctggcatttcagggtttgtgtttcgtcatgagatcaaggacaccttcctgaggacttacacggacgctatgcagacttacaatggcaatggcaatgatgagaggagccgggcagtggaccatgtgcagcgcagcctgagctgctgtggtgtgcagaactacaccaactggagcaccagcccctacttcctggagcatggc

SEQ ID NO: 110 - DNA, 519 bp, Pseudomonas aeruginosa
  misc_feature 239, 383: n=a, c, t, or g
aattcgcggccgcgtcgaccaagtgcaacaccctccactgtgccttttggaccagcaccaacaggaatgtatccctccgtgcctcccaccggaccacctccaggacccccagcaccctttcctccttccggaccatcatgtcccccacctggtggtccttatccagccccaactgtgccgggccctggccccacagggccatatcctacaccaaatatgccctttccagagctacccanaccatatggtgcacccacagatccagctgcagctggtcctttaggtccatggggatccatgtcttctggaccttgggcgccaggaatgggagggcagtatcctacccctaatatgccatatccatctccaggcccatatcccgntcctcctcctccccaagcccctggggcagcaccacctgttccatggggcaccgttccaccaggagcctggggaccaccagcaccatatcctgcccctacaggatcgtatcccacaccaggactctatcctactccc

SEQ ID NO: 111 - DNA, 514 bp, Pseudomonas aeruginosa
  misc_feature 506: n = A,T,C or G
aattcgcggccgcgtcgactgcggaggagcctcctgtcacaacaccctggggagctacaagtgcatgtgtcccgccggcttccagtatgaacagttcagtggaggatgccaagacatcaatgaatgtggctctgcgcaggccccctgcagctatggctgttccaataccgagggcggttacctgtgtggctgtccacctggttacttccgcataggccaagggcactgtgtttctggaatgggcatgggccgaggaaacccagagccacctgtcagtggtgaaatggatgacaattcactctccccagaggcttgttacgagtgtaagatcaatggctaccccaaacggggcaggaaacggagaagcacaaacgaaactgatgcctccaatatcgaggatcagtctgagacagaagccaatgtgagtcttgcaagttgggatgttgagaagacagccatctttgctttcaatatttcccacgtcagtaacaaggttcgaatcctanaactcctt

SEQ ID NO: 112 - DNA, 400 bp, Pseudomonas aeruginosa
aattcgcggccgcgtcgacggggatgtttacaaccccagcaccggggtcttcacggctccttatgatgggcgctacctgatcacggccaccctcacccccgagagagacgcctacgtggaagcagtgctgtcggtctccaacgccagcagtggcccagctgcataccgctgggtacaggagagagttcctggaataccaccgccctccaggagctttgcatacctgcgggggcccgggggcattccacctcatcgtgcacctgaaggcgggagatgcagtccacgtcgtggtgactgggggcaagctggctcacacagactttgatgaaatgtactccacatttagtggggttttcttatatcctttcctttcccacctctaaggtggctggggagatgt

SEQ ID NO: 113 - DNA, 433 bp, Pseudomonas aeruginosa
aattcgcggccgcgtcgacaaagaaaaaaagaaagttttcactctgggctgtggaactatttcaggacttcctgaggggtttcctctggagcttcctgagtttcctcctggacattttgtctccaggtcccagcgccaggcaggggtggctcccggaagggctgtgggtgccaccctggctgactgcagccctctcttgcacctcctcccggccatccacccgcaggaggtcttcccccagcactggcttgtgaggagctccctctgcccgggagaaaatggctcctccgggtcacaggctcccctccagggactgaggggcatttttggattgtggggaaggcgctccagggcccggttctgtggccccaggcctgttgctcggctgggtggaggcacctctgcaggccgggagcttggtctttgaacacct

SEQ ID NO: 114 - DNA, 400 bp, Pseudomonas aeruginosa
aattcgcggccgcgtcgacggggatgtttacaaccccagcaccggggtcttcacggctccttatgatgggcgctacctgatcacggccaccctcacccccgagagagacgcctacgtggaagcagtgctgtcggtctccaacgccagcagtggcccagctgcataccgctgggtacaggagagagttcctggaataccaccgccctccaggagctttgcatacctgcgggggcccgggggcattccacctcatcgtgcacctgaaggcgggagatgcagtcaacgtcgtggtgactgggggcaagctggctcacacagactttgatgaaatgtactccacatttagtggggttttcttatatcctttcctttcccacctctaaggtggctggggagatgt

SEQ ID NO: 115 - DNA, 506 bp, Pseudomonas aeruginosa
aattcgcggccgcgtcgaccgcaactgtcaagacattgatgagtgtgtgactggcatccacaactgctccatcaacgagacctgcttcaacatccagggcggcttccgctgcctggccttcgagtgccctgagaactaccgccgctccgcagccacgctccagcaggagaagacagacacggtccgctgcatcaagtcctgccgccccaacgatgtcacatgcgtgttcgaccccgtgcacaccatctcccacaccgtcatctcgctgcctaccttccgcgagttcacccgccctgaagagatcatcttcctccgggccatcacgccaccgcatcctgccagccaggctaacatcatcttcgacatcacggaagggaacctgcgggactcttttgacatcatcaagcgttacatggacggcatgaccgtgggtgtcgtgcgccaggtgcggcccatcgtgggcccatttcatgccgtcctgaagctggagatgaactatgtggtcg

SEQ ID NO: 116 - DNA, 435 bp, Pseudomonas aeruginosa
aattcgcggccgcgtcgacacactgcagagtaatgctccatcaagtatgatggtgaaggatgaatatgtgcatgactttgagggacagccatcgttgtccactgaaggacattcaattcaaaccatccagcatccaccaagtaatcgtgcatcgacagagacatacagcaccccagctctgttagccccatctgagtctaatgctaccagcactgccaactttcccaacattcctgtggcttccacaagtcagcctgccagtatactggggggcagccatagtgaaggactgttgcagatagcatcagggcctcagccaggacagcagcagaatggatttactggtcagccagctacttaccatcataacagcactaccacctggactggaagtaggactgcaccatacacacctaatttgcctcaccaccaaaa

SEQ ID NO: 117 - DNA, 427 bp, Pseudomonas aeruginosa
  misc_feature 371, 404: n = A, T, C, or G.
aattcgcggccgcgtcgaccggcggccgaggagcggcggactccgggcgcggggagtcgaggcatttgcgcctgggcttcggagcgtagcgccagggcctgagcctttgaagcaggaggaggggaggagagagtggggctcctctatcgggaccccctccccatgtggatctgcccaggcggcggcggcggaggaggcgaccgagaagatgcccgccctgcgccccgctctgctgtgggcgctgctggcgctctggctgtgctgcgcgacccccgcgcatgcattgcagtgtcgagatggctatgaaccctgtgtaaatgaaggaatgtgtgttacctaccacaatggcacaggatactgcaaatgtccanaaggcttcttgggggaatattgtcaacatcganacccctgtgagaagaaccgctgc

SEQ ID NO: 118 - DNA, 427 bp, Pseudomonas aeruginosa
  misc_feature 371, 404: n = A,T,C or G
ttaagcgccggcgcagctggccgccggctcctcgccgcctgaggcccgcgcccctcagctccgtaaacgcggacccgaagcctcgcatcgcggtcccggactcggaaacttcgtcctcctcccctcctctctcaccccgaggagatagccctgggggaggggtacacctagacgggtccgccgccgccgcctcctccgctggctcttctacgggcgggacgcggggcgagacgacacccgcgacgaccgcgagaccgacacgacgcgctgggggcgcgtacgtaacgtcacagctctaccgatacttgggacacatttacttccttacacacaatggatggtgttaccgtgtcctatgacgtttacaggtnttccgaagaacccccttataacagttgtagctntggggacactcttcttggcgacg

SEQ ID NO: 119 - DNA, 2780 bp, Pseudomonas aeruginosa
atgattaacagtcatttgctctaccactgagctatcgcggaacgtctttcttccaaccctggacgcttccggtgttgctggattcgcgtctcagaggcgcgccattttacggatgcgcgcgggcatgtcaaccctctgatccaaaaagtttttcttctttttccacgagcgacaaaacggcccttccactgcatgcggcagcgctctcgcgcctaccggacgcccatgaaaaagccccgccgaagcggggctttccctgtccgcccccgaagaggtcaggcgaagacgatctcgtcgccttccaccttcgccgagatacgggcgtgcgccatagaccgggtcgaagccgacggcaatcagcttgtccagcgcctcctggctcagttccaaggctcagctcgcgctcggccaggcgcttgcgcaggcgaccgagctggatctcggcgatgccggcgatctgctcgcgagccagcggctcgaacaccaccacttcgtcgatccggttgatgaattccggacggaagtgcgcattgaccgcgtccatcactgcggcacgttgcgcctcgcggtcgccggccagctcctggatctgcgccgaaccgaggttggaggtcatcaccaccacggtgttgcggaagtccaccgtacgcccgtgactgtcggtcaggcgtccgtcctcgagcacctggaggagaatgttgaatacatccggatgggccttctccacctcgtccagcagcaccaccgagtagggcttgcggcggatcgcctcggtcaggtagccgccttcctcgaagccgacgtagcccggaggcgcgccgatcaggcgggccaccgagtgtttctccatgaactcggacatatctatccgcaccagcgcctcctcggtatcgaagaggaactcggccagcgccttgcacaactcggtcttgcccaccccggtcgggccgaggaagaggaacgagccgctcggccggttcggatcggcgaggccggcgcgcgaacggcgcacggcgttggacacggcgactaccgcctcgtcctggccgatcactcgccgatgcagctcctgctccatgcgcagcagcttctcgcgctcgccctcgagcatcttcgacaccgggataccggtccacttggaaaccacttcggcgatttcctcgtcggtcacctgttgcgcagcaactggttctcggtcttgccgtgctggtcgaccatctgcaggctgcgttccaggtccgggatggtctggtactggatgcgcgccatgctctcgaggtcgcccttgcgccgcgccgcctccatctcctgcttggcctgctcgatcttctgctggatctgcgccgagccctgcacctcggccttctcggacttccagatctcctcgaggtcggcgtattcgcgctcgagcttgacgatatcctcctccagcttggccaggcgcttcctggtggcttcgtcgtcttccttcttcagcgcctcgcgctcgatcttcagctggatcaggcgacggtcgagacgatccagttcctccggcttggagtcgatctccatgcggatgcggctggcggcctcgtcgatcaggtcgatggccttgtccggcagttgccgatcggtgatgtagcggtgcgacagcttggccgcggcgatgatcgcgccgtcggtgatgctcacccgtggtgcacttcatagcgttccttgaggccacggaggatggcgatggtgtcttcctcgctcggttcgtccaccagcaccttctggaagcggcgctccagcgcggcatccttctcgatgtactggcgatactcgtcgagggtagtagcaccgacgcagtgcagctcgccgcgcgccagagccggcttgagcatgttgccggcgtccatggcaccttccgccttgccggcgccgaccatggtgtgcagttcgtcgatgaacaggatgacccggccttcctgcttgcccagttcgttgaggaccgccttcaggcgttcctcgaactcgccgcggaacttggcaccggcgatcagcgcccccatgtccagggccagcaggcgcttgtccttgaggccgtccggcacttcgccgttgatgatgcgctgggccaggccctcgacgatggcggtcttgccgacgccgggttcgccgatcagcaccgggttgttcttggtccgccgctgcaggacctggatggtccggcggatctcgtcgtcgcgaccgatcaccgggtcgagcttgccttcctcggcgcgcttggtcatgtcgacggtgtacttgtccagcgcctggcgcgactcctcgacgttcgggtcgttcaccgcttcgccgccacgcaggttggccacggcattctccagcgccttgcgcgacacgccctggccgagcagcagcttgccgagcctggtgttctcgtccatcgcggccagcaataccagctcgctggagatgaactggtcgcccttctgctgggccaggcggtcagcctggttgagcaggcgtgcgagatcctgggacaggttcacgtcgccggtcgggctctggatcttcggcagcgcgtcgagttctttgttgaggccgctgcgcagggcggcgatatcgaagccgacctgcatcagcaggggcttgatcgaaccgccttgctgctcgagcagggcggaaagcaggtgcaccggctcgatggccggatggtcatggccaacggccagggactgggcgtcggagagcgccagttgcagcttgctggtcaaacggtctattcgcatgggtcgtccttccttctatag

SEQ ID NO: 120 - DNA, 2565 bp, Pseudomonas aeruginosa
  misc_feature 371, 404: n = A,T,C or G
atgcgaatagaccgtttgaccagcaagctgcaactggcgctctccgacgcccagtccctggccgttggccatgaccatccggccatcgagccggtgcacctgctttccgccctgctcgagcagcaaggcggttcgatcaagcccctgctgatgcaggtcggcttcgatatcgccgccctgcgcagcggcctcaacaaagaactcgacgcgctgccgaagatccagagcccgaccggcgacgtgaacctgtcccaggatctcgcacgcctgctcaaccaggctgaccgcctggcccagcagaagggcgaccagttcatctccagcgagctggtattgctggccgcgatggacgagaacaccaggctcggcaagctgctgctcggccagggcgtgtcgcgcaaggcgctggagaatgccgtggccaacctgcgtggcggcgaagcggtgaacgacccgaacgtcgaggagtcgcgccaggcgctggacaagtacaccgtcgacatgaccaagcgcgccgaggaaggcaagctcgacccggtgatcggtcgcgacgacgagatccgccggaccatccaggtcctgcagcggcggaccaagaacaacccggtgctgatcggcgaacccggcgtcggcaagaccgccatcgtcgagggcctggcccagcgcatcatcaacggcgaagtgccggacggcctcaaggacaagcgcctgctggccctggacatgggggcgctgatcgccggtgccaagttccgcggcgagttcgaggaacgcctgaaggcggtcctcaacgaactgggcaagcaggaaggccgggtcatcctgttcatcgacgaactgcacaccatggtcggcgccggcaaggcggaaggtgccatggacgccggcaacatgctcaagccggctctggcgcgcggcgagctgcactgcgtcggtgctactaccctcgacgagtatcgccagtacatcgagaaggatgccgcgctggagcgccgcttccagaaggtgctggtggacgaaccgagcgaggaagacaccatcgccatcctccgtggcctcaaggaacgctatgaagtgcaccacggggtgagcatcaccgacggcgcgatcatcgccgcggccaagctgtcgcaccgctacatcaccgatcggcaactgccggacaaggccatcgacctgatcgacgaggccgccagccgcatccgcatggagatcgactccaagccggaggaactggatcgtctcgaccgtcgcctgatccagctgaagatcgagcgcgaggcgctgaagaaggaagacgacgaagccaccaggaagcgcctggccaagctggaggaggatatcgtcaagctcgagcgcgaatacgccgacctcgaggagatctggaagtccgagaaggccgaggtgcagggctcggcgcagatccagcagaagatcgagcaggccaagcaggagatggaggcggcgcggcgcaagggcgacctcgagagcatggcgcgcatccagtaccagaccatcccggacctggaacgcagcctgcagatggtcgaccagcacggcaagaccgagaaccagttgctgcgcaacaaggtgaccgacgaggaaatcgccgaagtggtttccaagtggaccggtatcccggtgtcgaagatgctcgagggcgagcgcgagaagctgctgcgcatggagcaggagctgcatcggcgagtgatcggccaggacgaggcggtagtcgccgtgtccaacgccgtgcgccgttcgcgcgccggcctcgccgatccgaaccggccgagcggctcgttcctcttcctcggcccgaccggggtgggcaagaccgagttgtgcaaggcgctggccgagttcctcttcgataccgaggaggcgctggtgcggatagatatgtccgagttcatggagaaacactcggtggcccgcctgatcggcgcgcctccgggctacgtcggcttcgaggaaggcggctacctgaccgaggcgatccgccgcaagccctactcggtggtgctgctggacgaggtggagaaggcccatccggatgtattcaacattctcctccaggtgctcgaggacggacgcctgaccgacagtcacgggcgtacggtggacttccgcaacaccgtggtggtgatgacctccaacctcggttcggcgcagatccaggagctggccggcgaccgcgaggcgcaacgtgccgcagtgatggacgcggtcaatgcgcacttccgtccggaattcatcaaccggatcgacgaagtggtggtgttcgagccgctggctcgcgagcagatcgccggcatcgccgagatccagctcggtcgcctgcgcaagcgcctggccgagcgcgagctgagcctggaactgagccaggaggcgctggacaagctgattgccgtcggcttcgacccggtctatggcgcacgcccgctgaagcgggccatccagcgctggatcgagaacccgctggcgcaactgatcctggccggcaaattcgcgccgggtgccagtatctcggcgaaggtggaaggcgacgagatcgtcttcgcctga

SEQ ID NO: 121 - DNA, 399 bp, Pseudomonas aeruginosa
acgtcgggggcgcattgctacgcctgcagaatggtttcagggccttagaaacagaaaagcccacctagacaggcgggctattccatattgacatcacgtcaatgcgggcctaatgttcggcccagacggctgctagacaagaaccggcgtaacaccccttcctagcctatgcaactcgccccgtagaaaatggtgggtcgtgtaggattcgaacctacgaccaattggttaaaagccaactgctctaccgactgagctaacgacccaagtatgaggtggtcggggtagagagattcgaactcccgacatcctgctcccaaagcaggcgcgctaccggactgcgctataccccgattggaatttggctccgcgacctggactcgaaccagggacccaatg

SEQ ID NO: 122 - DNA, 811 bp, Pseudomonas aeruginosa
  misc_feature 9, 330, 331, 332, 620, 698, 715, 751, 759, 769, 780, 791,806, 807: n = A,T,C or G
  misc_feature (0)...(0)
gatgaaggnacccgagcggaacatccatctcacgaagtgcctgctcaaccactcgaatatccagaccaccatgagctacatcgaggccgactacgaccacatgcgtgccgtgctgcatgccagaagcctggcccaaggagcgctggagaacgtcaggaaggtggattacagcggctccccgcaagcctctgccaaaccgaagccatgcgggcaacctctcgctcgaatgggtgaagtaccgccgccggaggccaggacagaacctgcagaaccaagggagcacataccagggacaggcattcagggaggtccaaccgtgcgggaagaagnnncgctaccacagccacctgacaccttcgaccaaagcgtgctgttcactctgatggctcaacacttatcgaaccgtgccgcctcggcatccgcggctcccgctgcaacaagcggatctggtggatggggatctactgcccgaagcagtctcgcctagcgataccgatactgaagggccggctaccggacgaaaggtagccgcgcctcccagcagttcgctaggcctgtaagaaaaatctggaattaccgagagcgcctggattccagcgccggcatgctggcagagcccncgcagtttcacggccaaaaccgcagtaccctctgtaatcgctgattacgtcgggggcgcattgctacgcctgcagaantggtttcagggccttanaaacagaaaagcccaccttaaataggcgggctattnccatattngacatcacgntcaatgcgggncctaatgttcnggcccagacggctgnnctgg

SEQ ID NO: 123 - DNA, 812 bp, Pseudomonas aeruginosa
  misc_feature 9, 330, 331, 332, 620, 751, 759, 769, 780, 781, 794, 799,807, 808: n = A,T,C or G
gatgaaggnacccgagcggaacatccatctcacgaagtgcctgctcaaccactcgaatatccagaccaccatgagctacatcgaggccgactacgaccacatgcgtgccgtgctgcatgccagaagcctggcccaaggagcgctggagaacgtcaggaaggtggattacagcggctccccgcaagcctctgccaaaccgaagccatgcgggcaacctctcgctcgaatgggtgaagtaccgccgccggaggccaggacagaacctgcagaaccaagggagcacataccagggacaggcattcagggaggtccaaccgtgcgggaagaagnnncgctaccacagccacctgacaccttcgaccaaagcgtgctgttcactctgatggctcaacacttatcgaaccgtgccgcctcggcatccgcggctcccgctgcaacaagcggatctggtggatggggatctactgcccgaagcagtctcgcctagcgataccgatactgaagggccggctaccggacgaaaggtagccgcgcctcccagcagttcgctaggcctgtaagaaaaatctggaattaccgagagcgcctggattccagcgccggcatgctggcagagcccncgcagtttcacggccaaaaccgcagtaccctctgtaatcgctgattacgtcgggggcgcattgctacgcctgcagaaatggtttcagggccttagaaacagaaaagcccaccctaaataggcgggctattnccatattngacatcacgntcaatgcgggnncctaatgttcggncccanacggctgnnctgg

SEQ ID NO: 124 - DNA, 809 bp, Pseudomonas aeruginosa
  misc_feature 330, 331, 619, 634, 697, 711, 725, 731, 796: n = A,T,C or G
gatgaaggcacccgagcggaacatccacctcacgaagtgcctgctcaaccactcgaatatccagaccaccatgagctacatcgaggccgactacgaccacatgcgtgccgtgctgcatgccagaagcctggcccaaggagcgctggagaacgtcaggaaggtggattacagcggctccccgcaggcctctgccaaaccgaagccatgcgggcaacctctcgctcgaatgggtgaagtaccgccgccggaggccaggacagaacctgcagaaccaagggagcacacaccagggacaggcattcagggaggtccaaccgtgcgggaagaagnncgctaccacagccacctgacaccttcgatcaaagcgtgctgttcactctgatggctcaacacttatcgaaccgtgccgcctcggcatccgcagctcccgctgcaacaagcggatctggtggatggggatctaccgcccgaagcagtctcgcctagcgataccggtactgaagggccggctaccggacgaaaggtagccgcgcctcccagcagttcgctaggcctgtaggaaaaatctggaattaccgagagcgcctggattccagcgccggcatgctggcagggcccncgcaatttcaaggcngaaaccgcagtaccctctgtaatcgctgattacgtcgagggcacattgctacgcctgcagaanggtttcagagcctngaaaacagaaaagnccaccnaaataggcgggctatttccatatttgacatcccgtcaatgcggggccctaatggttcgggcccanacggcttgcttgg

SEQ ID NO: 125 - DNA, 828 bp, Pseudomonas aeruginosa
tttccggcacaccctggccaccgacttgatgaaggcacccgagcggaacattcacctcacgaagtgcctgctcaaccactcgaatatccagaccacgatgagctacatcgaggccgactacgatcacatgcgtgccgtgctgcatgctagaagcctggcccaaggcgcgctggagaatgtcaggaaggtggattacagcggctccccgcaagcctctgccaaaccgaagccatgcgggcaacctctcgctcgagtgagtgaagcgccgccaccggaggccaggacagagcctgcagaaccaagggagcacacgccagggacaggcattcagggaggtccaaccgcgtgggaagcagatgcgctaccacagccacctgacaccttcgaaccaagcgtgctgttcactctgatggctcaaaacttatcgaaccgtgccgcctcggcatccgcggctcccgctgcaacaagcggatcaggcggatggggatctgccgcccgaagcaatctcgcctagcgataccggtactgagggccggctaccggacgaaaggtagccgtgccttccagcagatcgttaggcctgtaggaaaaatctggaattaccgagagcgcctggattccagcgccggcatgctggcagagccagcgcaatttcaaggccaataccacagtaccctctgtaatcgctgattacgtcgggggcgcattgctacgcctgcagaatggtttcagggccttagaaacagaaaagcccacctagaaaggcgggctattccatattgacatcacgtcaatgcgggcctaatgttcggcccagacggctgctag

SEQ ID NO: 126 - DNA, 800 bp, Pseudomonas aeruginosa
  misc_feature 711, 790, 795: n = A,T,C or G
gatgaaggacccgagcggaacatccacctcacgaagtgcctgctcaaccactcgaatatccagaccacgatgagctacatcgaggccgactacgatcacatgcgtgccgtgctgcatgctagaagcctggcccaaggcgcgctggagaatgtcaggaaggtggattacagcggctccccgcaagcctctgccaaaccgaaaccatgcgggcaacctctcgctcgagtgagtgaagcgccgccaccggaagccaggacagagcctgcagaaccaagggagcacacaccagggacaggcattcagggaggtccaaccgagtgggaagcagaagcgctaccacagccacctgacaccttcgagcaaagcgtgctgttcactctgatggctcaacacttatcgaaccgtgccgccacgacatctgcggctcccgccgcaaccagcggatcttgtagatggggatctgccgcccgaagcagcctcgcctagcgataccggtactgaggggccggctaccagacgaaaggtagccgcgcctcccagcagatcgctgggcctgtaggaaaaatctggaattaccgagagcgcctggattccagcgccggcatgctggcagagccccgcaatttcacggcaaaaccgcagtaccctctgtaatcgctgattacgtcgggggcacattgctacgcctgcagaatggtttcagagccttanaaacagaaaagcccacctagataggcgggctattccatattgacatcacggtcaatgcggggctaatgttcgggcccanacggntgcaa

SEQ ID NO: 127 - protein, 501 aa, Pseudomonas aeruginosa
VALTGNPLLKLLVVPVVIGAILIGVSMMGKKESAQSQGAATPTVTSEEAATLGIDGDTPADTLRTIVAESRQLKDQISKVIQENDSLKAANENLQGRLRNIDQNIEQKLNNTAQELQQQQENRSQTILDQVQKRLENLTHIPEAGDTDLPVGFGVRPKDGQHFQGAGSSSSDIVWIEPQDARAVDANGQPLAAGSTTQPSGFSFPTSFGNAVDRGQNALERIDDGLHPVGQQRSDLENRKLVRKTYTLPQNSTLMGSVAMFALIGRVPVDGTVNDPYPFKILIGPDNLTANGIELPDVAGAVASGTASGDWTLSCVRGQIRSLTFVFNDGTVRTFPAPAEEVNDNQSNNNQTASADQKTIQGGLGWISDPYGIPCIAGDRRSNAKEYLGNQSLLTAAGAGIAKLLDADENNTSTVFSGNGTSFGTTGTNSNSALNSILSGGVSDIRQWMNKLYGEAFAAVYVQPGARVAVHLDQQLAIDYELKGRKVDYSSGAAHATADLD

SEQ ID NO: 128 - protein, 294 aa, Pseudomonas aeruginosa
MIRKSTGSLLLMLALPTLAHAVEILRWERIPLAIPLTVGQERIVFVDRNVRVGVPRDLQGKLRVQSTGGALYLLANEPIPPARLRLQDATNGEQMLIDIAATEATADQQPREPVRIVAGEPVDPHYGQSREAQPSAAAKQTEHAEAPKAVPRETPVPVVLTRYAAQMLYAPLRTVEPVDGVGQVRVKRQLDLTTLLPSLPITATALGAWRLDDYYITAVKLQNASAQHLALDPRDLMGNFVAATFQHPYLGPRGDASDTTTVYLVTRGRGLADALLPSSISQIDPKGGRRGADR

SEQ ID NO: 129 - protein, 219 aa, Pseudomonas aeruginosa
MSFRKHTAQQQAHINTFRFITGFLCMVIVVLAYCVWEARKDLWIHIPPDLRSGSTRLWWDIPPESVYAFGLYIFQQVQRWPKDGEVDYKGNLFRYAAYLTPSCKVFLEKDFEFRRNAGELRGRERTTSEIPGRGIGESNGRVIQHSINDWTVNLDMDSTEYYAGEKIKRALARYPLHVIRADVDPETNPFGLQWDCYSDTPQRIELEEPAAPTKREGGL

SEQ ID NO: 130 - protein, 128 aa, Pseudomonas aeruginosa
MPEEHLFQDGTLSFLPTRLNRQPVVIGGLTADEMWITVFTSGAAGFVLGIPAALVAGNAACIPLGALLVGALGLGIGSRVLRRMKRGRPDTWFYRQVEMALSLRFPVFGNRRLVTRSGAWTSRRTESP

SEQ ID NO: 131 - protein, 118 aa, Pseudomonas aeruginosa
MLKLTLQKLSALCQSLAAITLALPGIALAALPKPEAPSRGEGSGIMQTIQNFGYDGAMLLALLICAAVFLGVAWHTYGTYHAIHDGKKKWSDLGAGVAVGVGLLILIIYLVTKATAIM

SEQ ID NO: 132 - protein, 123 aa, Pseudomonas aeruginosa
MSMSGAQTSAFQAAAGFPPSAGEGLFIGAAMTFLLLWSAWAMYSTWRGWATNNLRQRHRWRFRDPGSWSSSASPLSSSSADPYGDTHAETHPPETVRPLPEPGRHHFGAPRYRLGCTPQTRGT

SEQ ID NO: 133 - protein, 119 aa, Pseudomonas aeruginosa
LICTRFAVNTPHPSLRRSCLAVLACSALVAQGAFAASASEQANLEVMIRQLNALEDTARRSAQGADEPGQRFYFDYPRLAADLQRIRQGLQDYMTPSRAQPRDPSDLSGNYTLRGGPMP

SEQ ID NO: 134 - protein, 101 aa, Pseudomonas aeruginosa
MSIKQPFEYHVENIVIPYKTLTKGVAMFKHKEDTLEPDDHALLNPLRWAEVVRLGQEGWELVSVQPLMRGVTEIGNQNAQGWAWGVALPVSYLLFFKRATS

SEQ ID NO: 135 - protein, 103 aa, Pseudomonas aeruginosa
MLRNISIGVLLAMAAMLGSYGVAAATLRCGSAIVSEGDLIDDVLRKCGNPDSRKIEGPAVDGSGYIVRGAATVENWVYGPRNGWYQKLRFVDGRLVQIKGSMD

SEQ ID NO: 136 - protein, 385 aa, Pseudomonas aeruginosa
MKLILDFDGRLLNPSNMLEALSKAGKNTSISISNAQALNIETLLKATTTAENTKNLSTTFNGAELTANNLQQVINSAGSLTRVSTIAAQAININTLLSAISTAGNSKNFSAEFNGAQLSSDNLLRAVNAAGTNTSISVNTAQAANITALLQTIHAAGDTKTFSAEFNGAQLTSNNIQQALDAAGTRTSISVNTAQAVNISTLLALINSAKDTKKFSADFNGAQLTADNLQQAISAAASGTNISVNTAQAANISTLLQAINIAGNTKKFSANFNGAQLTSNNIQQALRATGSNTSISMNSAQSANQSTLLELLDIASSSKQFQANYNGGMSNPNNLQQIVFPCRRQYNRVYFRRTRPTNRKYPYPYIICRMRLIAVDENTPSTAIP

SEQ ID NO: 137 - protein, 493 aa, Pseudomonas aeruginosa
VQWTHEQSPIIQSKAPKILVRAFAGTGKTTTLVGFARSNPTLRILYLCYNSSVEKAAKGKFPRNVVCKTAHSLAHAVYGIQYAHKKTKNLRLTDIARGLDTQDWELVRDVLATLNNYMASADAELGRPHFPRFRDKAFLTSAQERFLKQGLDMARVVWRRMVDLQDTGMLMPLDGYLKLYQLSKPDLSQRFDCMLLDEGQDINPVIADIAHWQRIRMAIVGDPHQQLYRFRGAEDALNSDWMAGAEEHYLTQSWRFGPAIAHVANIILSYKGETRKLQGLGPQTLVKKSLPPDLPHRTFIHRTVIGVIENALQLVRNHPEPKFHWVGGIDSYSLRDLEDLYAFSRGLRQNVQNKKLLRDYRDYTQYVEIAEISQDGEMLRSIKIISTYPDLPARILELRSLTLDDELDATITLTTAHKAKGLEWDFVCLYDDFNADPLAPDTDPGKRDDELNLIYVAVTRAMKILAINSLVLSIMQRYVDDRKLKEQIASCKK

SEQ ID NO: 138 - protein, 216 aa, Pseudomonas aeruginosa
MFGSLIGAIIVEWVCLYFFWPDAGWKHAQAMFEYELSWLSQGLLHSVVVQEPGRTATWLAQLAYDWLFVKTGMVDWMTNMTTIAQARPRSPLDVRYLTAHGVSTLQNYGLAALYTVLTFVVRLVILVMTIPLFVMAAFTGLVDGLVRRDLRKFGAGRESSYLYHKARGSIIPLAVVPWTLYLAIPISINPLLILLPCAALLGVAVCITASTFKKYL

SEQ ID NO: 139 - protein, 931 aa, Pseudomonas aeruginosa
MKLKNFLQPFDSGFSTPSAALKLLRMLGGALMLCVLCSLIFSVSMVLNHQVSLSRQAMNVAMYEAQLYFEQREALLNHLSGNVVPLAAGRALVNEAPNNVSILPLSDGGRGLLLTARTLGDLREKRLALMYLVDTDKGPLVYRLTADGRPSAAISSTITKEVYRALLATPSAPVHWVTDGGTPQRLYLFESLGDEPGEGWLGLEILGEDLDSMLRRNDAGNYMLLDQHGQVVLATDAEALGSGASRTLLRGDGFGFIGAGPLPQHMVLFQHVGSSSWDLIYHIGIGRLLLALWLPLLLASALALAVGILLHWLVRSIERRLIEPAKRRLEALKESEAFSRAVIQAAPVALCVLRRADAAVVLENPQARQWLGDSEAIAHDAPRWISQAFAGGVKCSGEELETEAGLHLHLNYTPTRYNGEDVLFCAFSEISARKRMEAELARAKSLADAANEAKTLFLATMSHEIRTPLYGMLGTLELLGRTELSRQQAGYLKAIQHSSSTLLQLISDVLDVSKIEAGQLDLECVEFSPLELTEEVVQSFTGAAQAKGLQLYTCLSAELPLRMRGAAASIRQILNNLLSNAVKFTDNGYVNVHLKASVVDAECVMLTWQVNDTGMGINVEDQPRLFEPFYQIRRSEHPVAGTGLGLSISQRLAQLMNGSLKLVSELGLGSSFSLRLPLERIAMQAEPQDLAGCAVQVLAPVRDLTECLCGWISRWGGRAMVATPRSLDEADATSLLVKVLLLEGAPMFEAWPGCRVELSPQGDMEPQAQGRDWLLGLNNLNGLHRALGLAHGRLADPSTPPIRLAPLRNLGLRVLVVEDNAINQLILRDQMEALGCSVELLFDGREALLHCQTACFDVVLTDINMPNMNGYELTAELRRQGFRQPIIGATVNAMREERERCMSAGMNDCLVKPVDLNALQNCLINILKVDR

SEQ ID NO: 140 - protein, 399 aa, Pseudomonas aeruginosa
MSWKSYRVLVVEDQPFQREYLLNLFRERGVQYLVGAGDGAEALRCLKQDRFDLILSDLMMPGMDGIQMILQLPYLKHRPKLALMSSSSQRMMLSASRVAQSLGLSVIDLLPKPTLPKAIGQLLEHLERCLRQKLEPETDETPHGRTALLDALHNEQLVTWFQAKKSLHTGRIVGAEALIRWSHPQHGLLLPSCFMSDVDATGLHEALLWRVLEQTLNAQESWRRAGYEIPVSVNLPPHLLDNQELPDRLYEYVGARGACTSSLCFELTESSVTTLSSNYYAGACRLRMKGFGLAQDDFGQGYSSFYNLVTTPFTELKIDRSLVQGCVEDNGLNAAVISCIELGHRLNLDVVAEGVETCEELNLLRRLGCDRAQGFLISKAVSAREFERQLREDGPSLLV

SEQ ID NO: 141 - protein, 1084 aa, Pseudomonas aeruginosa
VKSASALEHDNKLLLKWTTLSQSLSIGLICVVVLTVLLFSICYWSLGRLFQEEEDKVSFHFTRMMDVIREHEVFLGRIARKSDKTTQKYDYDVVPLQRHLLAKENGLAVYEGREFSFAMPFLLATKHALSADSSGDPFSLGVLLANFYGSFWSVSAYPAPQLLIFDLSGSTRLAVPSIPSTAQRDRLSGSYPMIVERILARLRTRPVGEDAQRVHWIRADRYRDSALEMLGVARVDLPETLWWHDEPNHLIIAASLLDLRRINDFEQLVERPAFDSYSLVSPDGEVLLGAAPATGLRDGLNLTRQGVAVQLLSQPENGWLAVYRTDYGNFFRHSRWLVAGLLLTPALLLAGWLGMRWYTSSVVNPVHRAHRQLVESDTFSRTLIQTAPVALVVLTQDDQQLVTCNHLAAQWLGGPTEILGLTSNWKLFDARGQVPGDICIQVGGRYLQTAFAATRYAGTEAVLCVFNDITVHCEAETALSNAKRAADAASQAKTLFLARMSHEIRTPLYGVLGTLELLDLTTLNERQRAYLRTIQSSSATLMQLISDVLDVSKIEAGQMALTLAAFNPLDLVREVLGNFAASAMAKDLQFYACIDTEVPAQLIGDVTRIRQVLNNLVNNALKFTDIGRVVLRVKLLSRNDGRALLQWQVADTGIGIAHEQQERLFEAFYQVSGAHHAGGTGLGLSICWHLAEMMGGHLRMVSETGLGSSFSLVLELPEDEQSGLACRPGLLKSACVHVRSPVRELADSVGAWLKAWGCKVSSGEAAPSELETCVLLELLPMAAGPASSPWPGPRVRASMDAPCQPELREDGWRVGLHNLAGIGQALAQALGGDIPEQTPANACARSGRLDLEVLVAEDNPVNQALLREQLEELGCRVSLAGDGRQALQLFDSGRFDLLLSDVNMPNMTGYELTQALRERGETLPIIGVTANALREEGERCRAVGMNSWLVKPITLHTLHELLSEFARAGVVLPAQARDLGPPAQLDDGLSPQVPERMRALFLETMGKDLEAARQAIRRNDPKGLQQDLHRMAGSLAVMRARTLVVMCQGAEEGLLESRLECSAVEIGEVLVHIEQALEFVRKTG

SEQ ID NO: 142 - protein, 231 aa, Pseudomonas aeruginosa
MRPGSIVGIRTQEKPMSKLKIVLADDHPIVRMGVCDMLERDGRFEVVGEASTPSELVEVCRQSEPHIAITDYSMPGDERYGDGLKLIDYLLRNFPRTKVLIFTMVGNRLILDSLYDHGVSGVVLKSGELDELLLALDVVKQNRVYRGANMLDPTSVLANRDEVESRFARLSMKEFEVLRHFVSGSNVCDIARLLKRSVKTVSTQKVSAMRKLEVNSDQALMTFCVHANLFH

SEQ ID NO: 143 - protein, 238 aa, Pseudomonas aeruginosa
VSSKILLQGALLGLAMLAVLDARAGVTAERTRAIIAEGHRETSLLLVNQNAYPVIVQTWIDDGAPNSTPQSARAPIMPLPPVFRLEPGQQRSLRLLRTGQALPGDRESLYWLNLYEIPPQATGLLAEGQSRLTVTLRTQMKVIYRPRPLARGAEEAPHQLRFERRGETLQMENPTPYFISLAGAELGGHTRLAAAELLPPFSRRVLALRQALPGGQAEVRFSWIDDGGNLQQGRSLLH

SEQ ID NO: 144 - protein, 448 aa, Pseudomonas aeruginosa
MKTSLRVLPLLLALLASSSWATCYKVTAVGNATTTSNTQIRPGEGSAGTWAGACDTCNGSLGLPSVINVSDASFQPDGSLIASSVAPLSQYGDSAGYDPERVFFRCAPEDDVYEMFSTNADDLYSGWYLGGDSAGNSIGLQSAYRTAWPNVLLRLTHVETGQYFTDVWRERLLGGLDIDSRGFQLVKAKNLSAVRAELFRAPLEFIRYYSPTTASRLYAYTQPAGYIAIKGPGLAYPNVGASHNANYLGWHYNWPGAIGLYNDVTLKRYPTCSVTNVTPHVVFPSISLSEINAGANREMPFEVAFKCQTGVINSTASSGTALGIRASAGAQAASAALGLRNANGGLSYLVSDRYGQPGMAQGVGIRLLRDGSAMNLLVSEDSAMGSNAETRGWYPVIGNASNKTGEAGGISQYSETFRARLEKLTVGSMPSVTPGRVEASAQVVIRVQ

SEQ ID NO: 145 - protein, 870 aa, Pseudomonas aeruginosa
MFCHVEARRTGKLPLALGGLALAFAGLANGEAQYRFDDSLLMGSGLAGGTLERFNRANQVDPGTYHVDVYLNGSYASRTRIEFRPRAGGVKPCFGERFLRRTLGVRPASEAGVQAPGDCLGLEERLPGSTFNLDTALLRLDLSVPQALLDIKPRGYVGPDEWDAGSSMGFVNYDASFYRSSFDGVGGNGDSDYGYLGLSGGINFGLWRLRHQSNYSYSSYAGNTRSDWNSIRTYAQRAVPGLRSELTLGESFTEGNLFGSLGYRGVRLASDDRMLADSQRRYAPQVRGTANSNARVVISQNGKKVHESAVAPGPFVINDLYGTAYDGDLDVQVIEADGSVSRFSVPFSAVPESMRPGISRYSATLGQARQYGDGNDLFGDFTYQRGLTNSLTANLGSRLAEDYLALLGGGVLATPYGAFGFNSIFSHATVENGQRKQGWRVGLNYSRTFQPTQTTLTLAGYRYSTEGYRDLGDALSARHADEHNDSWNSSSYKQRNQFTLLVNQGLGGYGNLYLSGATSDYYDGKSRDTQLQFGYSNTWRQLSYNLAYSRQQTTWYRDLNDDYDPSLPPQYNLRHGSERSNTLTLTLSMPLGSSSQAPNLSAMASRRSGDSRGSSYQTGLNGTLDEDRSLSYAIAAGRDSDNHGSDFNGSLQKQTSVATLNAGYAENSSYRQLNTGLRGAAVLHRGGLTLGPYVGDTFALVEAKGASGAGVRGGQGARVNGNGYAVVPSLSPYRYNPVSLDPQGMGEEAELLETERKIAPYAGAAVHVKFRTLTGHPLLIQAQLADGSALPLGANVLDSQGVNIGMVGQGGQVYARAEGDKGRLRVQWSERPGDACLLDYDLDTGPRQAIEPGQAVIRLQGTCTPVSEAP

SEQ ID NO: 146 - protein, 248 aa, Pseudomonas aeruginosa
MNTFPLPPLRAATLALALLIPAIPAQSSVVIIGTRVIYPGDAREKTVQMINQDAFPNVIQAWIDNDDPSSTPETANAPFLVSPAVTRIAPGSGQTLRLLYTGLPLPEDRESLFHLNVLQIPPRDLAKAERNQMLLMQRSRLKLFYRPAALLGGSEQLVEQLHFSLVQASGNWRVRVDNPSGYYASFAGAMLSIGERRWRLLSSMVPPKGQAEWAAERPSPLAPGPVQLNALLINDYGARMEVQHVLPR

SEQ ID NO: 147 - protein, 182 aa, Pseudomonas aeruginosa
MKPQSTALTIAAFLALPGIAAAANTITFHGEVTDQTCSAVVDGRTDPTVILDTVPVSALDGAVGKPAGETSFTLQLTGCAAPAADAEEHFSVMFQAVNPTSAGNLTNTASAGATGVALQLLTAPGGSEVNLAGGSAVAAGDIVLAGGETSTSYDYAVRYISEATTVTPGPVLGSVTYTLRYE

SEQ ID NO: 148 - protein, 248 aa, Pseudomonas aeruginosa
MAEVTQRAEQQQESQKTLLGTIISTPFQFLGVMFGSLIGAIIVEWVCLYFFWPDAGWKHAQAMFEYELSWLSQGLLHSVVVQEPGRTATWLAQLAYDWLFVKTGMVDWMTNMTTIAQAGPRSPLDVRYLTAQGVSTLQNYGLAALYTVLTFVVRLVILVMTIPLFVMAAFTGLVDGLVRRDLRKFGAGRESSYLYHKARGSIIPLAVVPWTLYLAIPININPLLILLPCAALLGVAVCITASTFKKYL

SEQ ID NO: 149 - protein, 744 aa, Pseudomonas aeruginosa
MAGQYPLEALLRPAVELYTTTVCFTAAALCIVAPWTFSLTPLFGIVAALCFAWLGIVRLKQAGVVLRYRRNIRRLPKYTMTSAEMPVSNEHLFIGKGFRWTQKHTQRLADTYLPQFASYVEPSPLYERARRLEKQLEFAPFPLKLVAKATAWDVAWNPARPLPPVGGLPRLHGIEPREQDVGLQLGERVGHTLVLGTTRVGKTRLAELFITQDIRRTHCRVRRRRVKMGRRTQTVHHGYRRRRAEEQPDYEVVIVFDPKGDADLLKRMYVECERAGRLDEFYVFHLGHPDLSARYNAVGRFGRISEVATRVAGQLSGEGNSAAFREFAWRFVNIIARALHALGIRPDYQQILRHVVNIDALFVEYAQKYISEHDPRAWDTIIQIEGKLNDKNIPFNMKGRPLRVVAIDQYLTQKRIADPVMEGLKSAVRYDKTYFDKIVASLLPLLEKLTTGRISELLSPNYADLNDPRPIFDWMQVIRKRAVVYVGLDALSDTEVAAAVGNSMFSDLVSVAGHIYKHGVDDGLPGSLASGKVRINLHADEFNELIGDEFIPMVNKAGGAGVQVTAYTQTMSDIEAKIGSRAKAGQIIGNFNNLFMLRVRETATAELLTNQLPKVQIYTSTPASGANDAINNNKKVAFTSSSHDQVQMTSVPMLEPAHIIGLPKGQAFALLEGGNLWKIRMPLPAVAPDEVMPKSLQELAAGMRKGQAANSEWWEAPGYSALQDGLPQDLVDDFRHLGTGEDAA

SEQ ID NO: 150 - protein, 85 aa, Pseudomonas aeruginosa
MTTHLITLVIKQPSDAQARQLMYQELLGLISRYGGEVTSKALEDESTLCELLVQMLPDHEVEQARKQVLELHAKGRLQAPASLKV

SEQ ID NO: 151 - protein, 166 aa, Pseudomonas aeruginosa
MKKFLATLAFCTAFATQAWAAGLIVVEDLGGASALPYYQGLDPQPSASAPGPGDLGVRGSGAFPVRSARLSPGRVQGRAINAPGLQLLFLVGDDTLSRTWLKERGDELRDLQAVGLAVNVASEARLTEIRAWGKGLQILPAPADDLVDRLGLQHYPALITSTAIQQ

SEQ ID NO: 152 - protein, 193 aa, Pseudomonas aeruginosa
MATSVVRALQLATLLVLVNIAQAAVDPPPAYKQIALPKGVPAEVLYSVALTESKVLLRGEYVPWPWTLNVAGKSYYYATRTAACTALLAAINLYGAKSVDSGLGQVNIGWNGHRFSSPCESLDPYKNLDATSDILIEQRDALYASAPGRPVDWIQVAGRYHRPAGGAPAAKYRRTVSRHLSQVLGVNLLVTNP

SEQ ID NO: 153 - protein, 251 aa, Pseudomonas aeruginosa
MIRTVSLLSGLMLLLSYPAAGQEAAASREASSQLSGSQLGTLKQQTSQSDLAQEWGLNQQEWTRYQTLMQGPRGAYSPGIDPLTALGIEARSAEERRRYADLQVQAERRRVEKELAYQRAYDEAFARAYPGEGVIRLTESSTANPSGTPNMSPALQSSGRLALFVQDNCTACIQRVRDLQHAEKEFDLYFVGSQNDAERVRRWAILAGIDPKKVRSKQITLNHDEGRWMALGLGGALPALVQEVNGRWQRL

SEQ ID NO: 154 - protein, 229 aa, Pseudomonas aeruginosa
MKRPSPASMILGLCLTAMAGLLSYQQYQLVQLRSGVDSAAEKASLEAILARLSRVDERLDAVDGQHLVSNEDFRSGQQALSNRIDAAQAFAKQASDAVENLAQTTASAGDLLVLKATVETLDGSVRTLQEKQAKAPPLIVPAPKRPIPAKPKPKPKPMEPPPFSILGVEYRGGERFLSVAPPGSTQLSQIYLIRRGDAVAGTTWRLTDLDDGTAHFDVAGTSRSVRIQP

SEQ ID NO: 155 - protein, 343 aa, Pseudomonas aeruginosa
MAEAIRKDAMMTKLYFDLLNSPAEAHSSIQKSLSVQAISTTVPILEFPSETVYAYASYINALSIGQRIDPAFTQSLTSAISNLAGRPIAVSDIYQKIHETTLRTPVEMGVRPNSITFEEYQATINQQAINMVQDMQDGDKGEKVEALQANMQFLYGQEINTDFIARNELAAGQRAKTVAIVQGHITIGYGFDTFVHEASELNSLNLVGSTRQKVLPALQLSTSDPGFWSVYALLGQSLTDDDGLLLFSAKARAVVQRIASNQFAGKWNGLPPAIKTVALDLYYQYGQTGNFPKFQQAINSHDWPAVIHELRNWNGVPNDPLQFITKRLEERAKYLAISFNYEQ

SEQ ID NO: 156 - protein, 221 aa, Pseudomonas aeruginosa
MNNTVSETQQINIYQNPGQSISGLYKGLANQCSPGQPFPEVQLVEAWDIPLVLHPEFVPNGDVSKIDKEYGTILAAESAQVILLQLQMAQDKAKACGEVTALISSVSSNLNTIKSRHGANYLNLLKQSPNRYPTSVGVEIMSGGSPNQDSGIEVSYGASLGRLTQSQLQAMNLPASLKQLLTQGIGVKLSQPEYWPAYNNIATGIRYTTGVAITLAYWATV

SEQ ID NO: 157 - protein, 224 aa, Pseudomonas aeruginosa
MTQAAKIPANEYSLGDGRGYINIWPEKDEAQAFLIHNDGPNGATCSLKGTLRDNKGVVHSPYSSASCLLSITQTGLLSVSVKREENSPSCSAWCGPRVWFEGAYSVPPKGCYYMQIRKKTRQMLGMIEKKELDAARALSNKLLSDCATELAYPAKIYLTNTLAMISAEKGENARCLEYAHRVQKQIPVRDDGQPAEDLLPAEHAFAMEQRAKADALSERCSDEK

SEQ ID NO: 158 - protein, 81 aa, Pseudomonas aeruginosa
VLVERLPTDVEFAGELSLGLAGRCPQPQGSTCLSDKASLRPRYAQSLISSRYRAGAACMLLSKPAAGLFRVSVRPIHLYLG

SEQ ID NO: 159 - protein, 119 aa, Pseudomonas aeruginosa
MDIRLEILALEQLLLEPESRKNDRLLKQLLTEDFVEFGAIGKSWTKAEVIVGLKSQTWIKRTIEDFKLRVLADGVALATYRCRHQNANGDESLSMRSSVWKTYEDGWHMVFHQGTRVSE

SEQ ID NO: 160 - protein, 511 aa, Pseudomonas aeruginosa
MTSSPNLDQMTPEQLRALAAQALQLQSQVEAMSRKIRNNETLIEQFKFEIALLKRHKFAKRSEQISSAQGSLLDDLLDTDLEAIEAELKQLLPASPQAEPRQSPKRSPLPPQFPRTVIRHEPENTQCACGCQLQRIGEDVSEKLDYTPGVFTVEQHVRGKWACRQCETLIQAPVPAQVIDKGIPTAGLLAHVMVAKFADHLPLYRQEKIFGRAGLPIARSTLAQWVGQTGVRLQPLVDALREAVLNQDVIHADETPVQMLAPGEKKTHRVYVWAYSTTPFSALKAVVYDFSPSRAGEHARNFLGDWNGKLVCDDFAGYKAGFEQGITEIGCMAHARRKFFDLHVANKSQLAEQALHSIGGLYEVERQARDMSNEDRWRIRQEMAVPISKTLHDWMLAQRDLVPNGSATAKALDYSLKRWGALTRYLDDGAVPIDNNQVENQIRPWALGRSNWLFAGSLRSGKRAAAIMSLIQSARMNGHDPYAYLKDVLTRLPTLRSKDISQLLPHQWVQI

SEQ ID NO: 161 - protein, 111 aa, Pseudomonas aeruginosa
MIRIDAIWLATEPMDMRAGTETALARVIAVFGAAKPHCAYLFANRRANRMKVLVHDGVGIWLAARRLNQGKFHWPGIRHGCEVELDSEQLQALVLGLPWQRVGTGGVISML

SEQ ID NO: 162 - protein, 88 aa, Pseudomonas aeruginosa
MRQRSSYPKPFKAQVVQECLQPGATVSSVAISHGINANVIRKWLTLYRDQPVPASLPAFVPLKATPKRPAETSVLIELPMAGQMITVK

SEQ ID NO: 163 - protein, 408 aa, Pseudomonas aeruginosa
MALSLIRSLTASASRNISALKRDAKRLQKNSFLVFGTEYPLKVCQNAVAVSRGFRSLADVDKLEQHIGMNRSAPFWVIRGRNDTHQGVLEALYCLDLEYTENGPVVFTGNPKHSILPALVLFLEQMSFKKLPGLILIETKETSIQTTHIFDAIEKLEVEETLNKFRFLDLRDRNLPVSLSTEARCWIESIVSLLPNDIQEEIRNKGWSTHLEISAYEHAKSRNQVFGSSNFPCVPFLSIKSAIYQLISGAYPPLWMQPSSSGEISKVDIRRPPLEKSSEETLLYLIKKLENRQFHTGISCEHESRWRPYVVLFSRNDPASEVLAGVIHSYFSWKQDRDHRSPTLYVSDGAVPYAPKLLGLGGHTVIANGITEIPDGDGLGEFYGYKNSLKVSSLSNGIQFMGKHVSLK

SEQ ID NO: 164 - protein, 749 aa, Pseudomonas aeruginosa
MNALTQPAALAASHLNINLTDFIDEFGDELLESLNRSNPPVYTGSVNAHRQLVMDRLKRKPFAAQAEVVQAITALLLDRNEQAGIINAEMGTGKTMMAIAVAAVMHAAGYRRTLVVSPPHLVYKWRREILETIPAARVWVLNGPDTLLKLLKLRDQMGDAYDGRQEFFILGRVRMRMGFHWRLACWKKRAAGGQLLAACPDCGQVLEDLEGNLVTVEEFERGDRRRTCSSCRGALWTLIRPGKPDGGNRRATILKSMCRIPTIGPVRAERLLNDFGEDFLATMLVDNVSEFINLMDAKGNFVFSDRQAKRMERSMANIEFGFGEGGYQPTEFIKRYLPDGYFDLLVLDEGHEYKNSGSAQGQAMGVLAAKARKTVLLTGTLMGGYADDLFYLLFRILTQRMIEDGYRPNARGSMAPAAMSFMRDHGVLKDIYTERDGDSHKTARGKKLSVRTVKAPGFGPKGIHRFVLPFTVFLKLKDIGGNVLPDYQEEFIDVPMAPEQASAYQRLAATLTAELRQALARRDTTLLGVVLNVLLAWPDCCFRPEIVKHPRTRDTLAFVPAIFGDEQLIPKEQVLVDLCFEEKAKGRKVLAYTVYSGTRDTTSRLKKVLEQSGLKVAVLRASVDTARREDWILDQVDRGIDVLITNPELVKTGLDLLDFPTIAFLQTGYNVYTLQQAARRSWRIGQKHPVRVVFFGYAGSSQITCLQLMAKKIAVAQSTSGDVPESGLDSLNQDGDSVEMALARQLIAA

SEQ ID NO: 165 - protein, 483 aa, Pseudomonas aeruginosa
MALMFPRLARNFARNGYFPTDEVTLERALQALTLAPSGRMRICDPCAGEGVALAEAAHTLGRDQVQALAVEYDRERADHARGLLDRVLHSDLFDTMISRQSFGLLWLNPPYGDLVADHSGASQYQGSGRRRLEKAFYQRCLPLLQYGGVMVLIVPHYVLDDELTGWLSNHFTGLRIYAAADPTFKQVVIFGIRVRRQDLARADANQVRSRLQAIGAGQEKAEEIPAAWPWEPYVVLPATSELEHFYRVTLEPEQFAGEIQRLRGLWPDFNLHFAQAGLQPRPPVRELSRWHLALALAAGAISGVVRSKSGRILVVKGDTYKDKVRKTEFTEDDDGNITEVRILTDRFIPIIRAWEMTPSSVNQGRVLTISSSAATTEEAEEPQPEPAPAPAPLLISPGRVVMTAAVSHLVETGQLNPAPLLKRHLAGDWGTLDQEDWNTNQRALKFGDRLLSSYDIDAGDESRLWIITEADRSSTTLLLPSDY

SEQ ID NO: 166 - protein, 201 aa, Pseudomonas aeruginosa
MPSPTPLYQIEECPDLYVDACVCDEQCNLVFLSAWGRDTVTQEFLARLTLGREENGIDHFHIIVDGRRLPVFPNQDLLEKRTTRQFRGTLFGSLLNLWLFDRRASAPDRGNHLAFALLQRDEDPHQRLWPLVMETCPLPLLQHWREPVMEVLTQHQMLTALPGTIGNVCAWRLALRVDVLEPTLGEVIRESILTTDAQAQA

SEQ ID NO: 167 - protein, 84 aa, Pseudomonas aeruginosa
MNPLFTNLTQETLAYLEDQLSNNDVAGDDELIDLFIEELSLTLEQAEAAVALRDQYLCQVFLIGQGPLHQADGLSFDPHTKSVR

SEQ ID NO: 168 - protein, 120 aa, Pseudomonas aeruginosa
MGWLFSHQTKEDLLRELLAPTSTFAGSTEVLAHAVSGNELWTVVKRTFHLAGFYFGKPAGHSITMIELHLLDCSAGQWGYKTIPESAGPFYYGCPLEFLDLAHDEINQEWRKRLTHEHQA

SEQ ID NO: 169 - protein, 91 aa, Pseudomonas aeruginosa
MKSIYNTPGFSEELLLVCASLREVGLDNLADQFRAAVFDRSVVDQAIIALRERVKTPSPEHAADNEPWLYCDWQARQTAYRLLQRLERATR

SEQ ID NO: 170 - protein, 136 aa, Pseudomonas aeruginosa
IPSPRSRFGGIILFAGHTMITVPGQLAIRTINGRYGEFNVGKLWTSIGEFIIKDAFLDQHTEGKYRGDFVIANIRPHHYSAGGRLVIEIRAIVDSMTLNDMDSLSDEEVERLSGNEVDPLDEVPEIQLPTVVPAIP

SEQ ID NO: 171 - protein, 209 aa, Pseudomonas aeruginosa
MTSLNNHSSAGHTAAYLKLPIVLTNAAWLRLVYLANPARVDEMGTRLASVVQTAWQELSLQPTAKHIQFHLYHKEEEGQDRALALLVLSIVEPSDEPSYLRIELQEECLAEHPVTEPKSPSPQKSKPLCLAATRDAPFGMDTPAPAEQAASLDTDADAELFGTVWPLGEIVKLDTTVDRKRLRQQCVRLGALGYELDFKQQVWTRKEAA

SEQ ID NO: 172 - protein, 235 aa, Pseudomonas aeruginosa
MTQLNPFIRGYESFRIERNLQITDEGNNLPCYRALHETQQHLPDEYFQCELCYFNNDFAVVVQELDDERVEKCPHQGIVRNVLYSIYGEQDGRKKLIGDQYSLTEAESVVRYLSFGGGYNPCWEIRKTHLPISAWNSLYERFSTKMPIRLPSVLVSLFWCNEHGAVGFRLHNTPWTDECLEILEMTAAALRQEQLAFGLDEHLVDLLHLAGQADIRLLVLDPFAPTLKGLPLYDD

SEQ ID NO: 173 - protein, 78 aa, Pseudomonas aeruginosa
MGLVFPTERRITMQYGKLALAHLSLELPLQVLMNKNRAYYIGTSDEEGPASRESVEYYPSRELAQQALDHGTWTQLEY

SEQ ID NO: 174 - protein, 88 aa, Pseudomonas aeruginosa
MGNVWRLCQGRYLGIVVGQEQPGEVAELTAEQQLVLDVAEANLLNFRQGGQFYDLDVAHDDLQIMENTTPWGEMVPPGWVCDEEWRIA

SEQ ID NO: 175 - protein, 179 aa, Pseudomonas aeruginosa
LTGKVFLRFRLRNWRIIMSNNTQAQEAKYFDLHTTGIGYLNRIREVPIRRGEPFLAVTVAALHGAADSVEYSYIDCKVVGAQAEKLVRRCKEAVEAKKKVLISFRIGDIWADPFIHQKGEKQGKPDASLKGRLLFISWIKVDGTTVYDAKEEAEKAQQGKGEPQGEPAAPAEHAEQAAA

SEQ ID NO: 176 - protein, 188 aa, Pseudomonas aeruginosa
MSKQSTSFEIGFALGSVVREFRRALSRPPVVVQAQAPVALRVQRIDPAFLAGPTAGELEHISDIPAIVRLKKVNLNDWYLANTREVQKPKRARKPKPAKATAKAETPVRKELKMGSLDHLIAPNSESEMGRPPLQLESLNDHEIALLPAPPGSAVSWELHRRTQEQYQQRWQDYLSTMTDEQVAALGR

SEQ ID NO: 177 - protein, 214 aa, Pseudomonas aeruginosa
MVFLLQVEGAEKTLALAGKWIPRWVAEGSFYRPRPTDRATRSYAVLGWINTVGCAAAFRIRAAWGHVADNVSRSRVHHRSGGRKCQGQAGGGADAAGGERGRKSAAGRNPVKGFPSRVWKGSQVSHLWLNRRSLGIDRLDPITRPLSWLGQQTVGTHPRTKGALRITGGPPAGRRIPMGSLIVLEQEHQATHGEGKRRGRNTSTTLKSRKHRTS

SEQ ID NO: 178 - protein, 145 aa, Pseudomonas aeruginosa
MPLMWIVLVLALITGTWLSVQSDHATSSAELAEVDTLARSLLLFRSSLAEYAHANPGFTGSPADSALGLPAWFRKPARLQGYIAAGTSYAFIASPPAGLAAAVDAGTESDLVGVRRNGQLVTRRLGATVIALPTPIPEGAVVAVK

SEQ ID NO: 179 - protein, 442 aa, Pseudomonas aeruginosa
MRSTRSSGFISIELMIALVVIAIATAGGISVLMSYLDGLDEQHAAQQQQQVAKAAEKYLKDNFSTVLASAGATAPAVITVPMLRNTRYLPAGFRDTNIYGQQYQVLARKPAANQLETLIVTTGGQVASELSIRRIAQLMGATGGYISKTNTSIAQGAAWQVALSNFGSAPGAGHLATALFFQDGAIANEYLYRNAVPGHPELNRMNTTLDMGGNNIAAAGAITASGNITTSADISARNVTATGTVKAGTADVAGETYTGGWFRTRGDTGWYNEKWGGGWYMSDSTWVRSWMNKNVYTGGEMKAGKLTAEGRTEVGEYLQLKGVATEGANCSPNGLAGITSTGLWLSCQNGKWGRTAASMRLNTTAGVIKDWCTLHGQDSAMVNYDYVRYAITCGGRFCAVGFNQTFGTNYSFGLITEIGPGFNYPEPYKTPDSTNVTVTCVN

SEQ ID NO: 180 - protein, 313 aa, Pseudomonas aeruginosa
VSVNPIIQAQFVDLYLGEGFADVKGLAGAGARRVEVPREWESHVQELLQICRQTLEELQDPEFAIVVDGVLLRVTLLEDAFSGSVFVLRRSSAQLREFQEIGYPSEVVSALMDPQLQGLVLFCGEMATGKTSSAASLLLARLQELGGVGCAVEDPQETNLSGQHGLGRCIQVRTSRRSGGYSEALLRTLRAGADLVLIGEIRDEDTAYQACKASLTGSLVIATIHAKSCHQAIERLVTLAQPLARNAYDVVAEGIQAVICQALESDGSSRRLTAEPLLFTGDDGPSMRDKIRRKEAHLLQDDQARQSRQSLWR

SEQ ID NO: 181 - protein, 176 aa, Pseudomonas aeruginosa
MSTTQRTSRPTQGGFVSIEMIIVLIIIAIGVGLGLAAAAGMFSSSNANEEQRNISVIAANARALKTSSGYGSSGTNLIPSLIAINGVPKNMSVSSGVVYNVYGGSVTVSSTGMGFSITTSKLPQDACITLATKIAKNTFEQTKINSGSSITGEVTTAAATQACSSDSNSITWTYSS

SEQ ID NO: 182 - protein, 359 aa, Pseudomonas aeruginosa
MGGFWEQLQFAFYSKQFGRKERLQFYESMSTLLENGVPLKDAVAEVHKIFAHEGQHPFHPVAIASREALMGLSNGKRLATAMALYLPAQERALIEAGEMSGNLVQAMGDAVSLVEAQARIRATIWQALLYPSALSAMMVFLLCIVAYRMVPSLARLSDPVTWTGPLATLNAIASFVTGPGIYVLVAVITLTVVVIVTLPTYRWKGRVWLDRTLPPWSIYRMLQGTTFLLNMAVMLNAGIRPYDSLASMIKISPPWLKQRLEAARYGVGLGQNLGVALRSAGHDFPDRQAIQYLCILANRGGFSEALVKFSRRWQETSLKQIELAAGLVKNFALIFIGALMILVLLGAYQAQQLIQSMNH

SEQ ID NO: 183 - protein, 526 aa, Pseudomonas aeruginosa
MTNLQIAALAQPSMVTQLLTADGGEWEVSKHLQEIMALAADGTLYLSESHQNDIHVLSFIDRLDRRGFRYQLNLTDLQTIHQLYRAVAMDGLVDSDGQRATQMQERVVKIIRKATELRASDVHFVVSPAGTGSKIRFRVDGLLKTVEQFRSQELHELCATIYQSMCDVAEPLFKPQLDQDARMSQTFVEKLNLFSARIATRPRAGGFLMILRLLYDDTGLDSLEQLGYLPEQNALFDRMMRMPYGINILSGPTGSGKSMTLKVTLEGLDKLHGGSKHILTIEDPPEYRIRGEGINQTPLVYDATDPDAERQAWAAGIANGMRLDPDYMMIGEVRDLFAAVAAFRGAMTGHGLWSTLHTNSAIGIVQRLKDLGVDPGLLFDPALLTGLINQSLLPKLCPHCKVRFQDHQDQLAPDLVERVRRLTDVSQVHVKGPGCQACRGSGVNGRSIVAEVVLPTLAFMRVFAKGGPAEARNYWVKTMQGITKHAHAIRRINEGMFDPQMVEDFIGPLDFDEHLLDDSFYSQEAC

SEQ ID NO: 184 - protein, 177 aa, Pseudomonas aeruginosa
MRTEPIGMAVAVLFLLASGQACAGTVGELAEIQAQAILTEAKVRLATAQRQLEGKGETGQVVSAQGQTFAMPVPAAPPTITQPVPPVVRTIYGAGGKMTATFLFPGGYEVDAASGAELPGKYRVESISLDQVVLTDKDGNRVPVGFSSVAPTQASSTAQGASVPPALPGAVPQPFIQ

SEQ ID NO: 185 - protein, 441 aa, Pseudomonas aeruginosa
MEKPDLGSRGPDVSILSYHGNKFVSGLFWRPLSSQRQYMKEARKLGKEEHLDIVAIRHSPTVIQAGFVSKSQGAVKGMYSLASALSGQFDGDFLACWKVDEDRYALVATLDGAIVPGQDLVTTLDEARDRVRKLSTRGVLRNAQVFVPEGFDFPVKDFDIEELLAPKRLRRDYRLRQLTFGLSAREWTAVALLGCVVGGSLTAYYLWNAHQEELARQAALLEEQRRLAELAEKNAQAKQPLDLASLQKPWTLIPDLEDMLRACSKATGVLSLSIQGWLFESSKCDGRVLVATYHRTGNSTAADLTAASQHLFADRPAFVIDNGNTAALKVDLKVAIGSDEPLLPADDVLQALTSHLYRQGVEPKLSISQETTPPLPGAEAATEQQVVLPSWKKFTFSAQTRLPADLTFQGLPAAGVRITNLETTLKDSQLDWTVTGEIYAN

SEQ ID NO: 186 - protein, 540 aa, Pseudomonas aeruginosa
IVCEATADSASTIAAQVRNTRPDRRDTVVFSDKPWVSTKPLSVSHTLSSDCIVTWRPAGAASLQEAAQEVINQCHMAVSITPDALNPAAFAVQPQQRASNAPPPIQGGQDMATMLFPASVANGMSLGAGGSMGSSFGSYGPRSLYNIKWNGKVSGFLDLIAARAGVSWRYNPTEKRVEFYYLDTRTFRMYAFDDVNTVDSTVRSGMTTAAGISGDGSGSTGQNGSSGISGDSGSKQTTSSELKTSILSDIENSINSMLTPSMGRMSLSRATGTLTVTDRPEVLNRVQQLVNRENESITKQVLLNVNVLSVALTDKDQLGIDWNLVYKSLNNKWGIGLKNTMPGIDQSAISGSVSILDTANSAWAGSKAMVQALAQQGRVSTVRSPSVTTLNLQSAPIQIGRYDSYLASSQISNVAQVGSTTSLIPGAVTSGYNMSLLPFVMESGEMLLKININMTSRPTFEMQTSGDSKAQFPSYDIQLFDQKVRLRSGETLVLSGFDQTTEDTNKVGTGDAGFFGLGGGLTRNTKREVIVVLITPVVLG

SEQ ID NO: 187 - protein, 374 aa, Pseudomonas aeruginosa
MTRQLTTLTLCLLLASCTTHKAEPARPAFDSSRNPDLLSPDLYPNGVQPEKEPVVRYGRYTLVSTQPDAGQRDLMAQIIDVTIPSSMNPSVKDAMQYVMSRSGYSLCPADAGHVNILYTRPLPAAQYKLGPMTLRNTLQVLSGPAWQVKVDEVARQVCFVLRPGYQLPPAPRPKPVQQLYAKPAAPTPPAVAQPSSTEKVSTLESPIVVASVPTPAPITTSHAPAKKPESTTVLPPAAPAKDGHPSSPPAASAPTKPAASAVKSTPPTPPTVASAPPVKVLTPPEPSRPLAQAWSAETGSTLRDTLEAWAKRARWTVRWEPQDLNYPIEAPLTFHGSFEDAVSELFPLYDAAERPFLVNASRPQSLIIIKERKN

SEQ ID NO: 188 - protein, 108 aa, Pseudomonas aeruginosa
LSFKYYWAKFFWGAFFFVLVAWKGSVFPSLASVNPLVVAGFSTILFPFSVRLVEDFALKYTEKEFWVTGFFSETPAKTGLYAVFYLACYLFSIPLGMIFLFYKYGKAS

SEQ ID NO: 189 - protein, 498 aa, Pseudomonas aeruginosa
MSNDNEVPGSMVIVAQGPDDQYAYEVPPIDSAAVAGNMFGDLIQRDIYLQKNIYYPVRSIVEQGTKEKKEINKKVSDQVDGLLKQITQGKREATRQERVDVMSAVLHKMESDLEGYKKTFTKGPFIDYEKQSSLSIYEAWVKIWEKNSWEERKKYPFQQLVRDELERAVAYYKQDSLSEAVKVLRQELNKQKALKEKEDLSQLERDYKTRKANLEMKVQSELDQAGSALPPLVSPTPEQWLERATRLVTQAIADKKQLQTTNNTLIKNAPTPLEKQKAIYNGELLVDEIASLQTRLDKLNAETTRRRTEAERKAAEEQALQDAVKFTADFYKEVTEKFGARTSEMAHQLAEGARGKNIRSSAEAINSFEKHKDALNKKLSLKDRQAIAKAFDSLDKQMMAKSLEKFSKGFGVVGKAIDAASLYQEFKISTETGDWKPFFVKVETLAAGAAASWLVGIAFATATATPIGILGFALVMAVTGAMIDEGLLEKANNLVMSI

SEQ ID NO: 190 - protein, 657 aa, Pseudomonas aeruginosa
MNRPRLVNRTSATPSTLLQRAIFDGYDFGLKIPYIAGSNRALLELSGFFISAREHPLHRYWRVPKGKLLPELDTLYNRLAELAGGLHSQSWREFSSLVESAQASLDRQAFTWGMLLRIAPLAEGGVLLSGEFHPGVVAVARRMRGVFLRPSSSWRIDTTPELLRSNLILELGLAEEQFEILDTVQELLSDGSFAPSTELPSMSIGGPQQEPAAPSLEDESASDIYLAAVPEIERTEYSSADIEAALQGYSLLAHQPDGIAHLLQRTSALLADDMGLGKTRQAVIAASIRAAGRPILVITLATLLINWQREIQEVYPSATVAIQQDTPEAQWILVNYEQLSPFVANASRFAVMVIDEAQRMKEPTAQCTRHGFDIAAQVPNRYLLTGTPVLNRETELHTLLRLSGHPIGQLPLKEFCDRFAGNPEFRQSLRAELGDWMLRRRKDVLPSLKGKQRQLLKVALSTEERQQYDVLRLEDRPVFARLGALRRYLETVKVRVAMDLLSELDAEDKVILFCEFKPTVAALKELCEQAGHGCVTLVGNDSLTKRQKAIDRFQQDPDCRVFICTTAAAGTGNNLTAANYVFFLGLPWTPGQQEQAEDRAYRNGQLRMVVVKIPLVEATIDEQLWQLLNAKRQVAQDLIEPEQVDGNRALLAASLTG

SEQ ID NO: 191 - protein, 629 aa, Pseudomonas aeruginosa
VAPLDNAPPSGPLQDPSLARYSERQLAVANTWATHFSLAGTARTKFIRHYLRSTSTTRCWCITVAADNGVRYTIMRAGPLLQVFDGQLIGAWECKPAHRIPASTPSRAGALKLLQRLQKFDDAVAVLSSYTKRAHDLATQMARDDLGLQHRLVYPSHSNKRYYAPRHQFYLKQIGAVLRTFRQVLDQDLLFAIRSVRCLSPQLYNWLAQGDQVRRLQMLKAQPVLTPLLVDCEEGVWPHTTTNDNGESIRHYLPCPFPQLDSERPQAAAMPCDLYLDMGRILGQVADEGISVINFFAWLFQAPRASIRFLSHVSPGRAGGALFHRKREGRHSGWHALLLAASLGNRRPITRAQWTAFYAAYNAIPWQVHNAKPDYNRLFNGCPSDWQDPAWLAITARLRDIKEFYTALDQGNSQVVRQARSALKAYLGHCTYRQAGNLVDDYHQVQRELRAAVQSSLPDLVDTDEYTTWEGMLSVGLIDCPNGLQIVELRCPADLYAEHIALAHCIDSYDQAAYRGDCRLLSVREAGRPLASAELELRREHGEPIGRPWSPKHLSTVQLREFDNAPVPTDSPAGQAYRWFMERIRSGAIATNLNWPDMTVHMTRFANGRWKAGLAEATAKWLLTQLEDR

SEQ ID NO: 192 - protein, 156 aa, Pseudomonas aeruginosa
MRKENISAEITERAFDFFYWFSRFEFSLKENGYLKNYKPGARAEPGWENFVQNHSDKYSLSQSATALIEQSPEQQIVLPGRELGWRPVKLDEDKSDLARVARLLKTVRNNLFHGGKHGGANWDNPARTIHLILLSKAILDEFAALGDFEADYKRIY

SEQ ID NO: 193 - protein, 641 aa, Pseudomonas aeruginosa
MHIVIIEAPGKLKKLRSLLPSIRPDVTWQVEATAGHIRDLPVHGQDPQMLTVGVGQDFKPHYQILSGKEKTVARLKELRQKAVEIYVASDPDREGESIGWHILQAAGIKNYKRVAFKEITKSCITAELSSPRRLDLPKVASQECRRVIDRLVGYLVTPELRRVMGRPTTAGRVQSVAVYLVVLREREIRAFTAIKHFGVELTFVSPSDGRTWTAEWDPVPVFASEEFPYVQDRQLAELVGAIRNVIVETCIDSEETDAPPAPFISSSLQMAAGNALKWSPDKTMKVAQRLYEQGLITYHRTDNPNISKDSMPDIRAVAKALGLKCVEQQRMFKADQDAQEGHPAITPTDWMAAAAGETADEQALYQLIRVRALASQIEAAVYAVRTITLLGVGPDKKPLRFGAKGKLLNVPGWRKLLQGDDAEEQKNETPSNPIPIPALEPRQILKVYSGEVLEKKTTPPKRFTDASLVGEMKRRGIGRPSSYASIVKNIIDKGQVQMKGRSLIPGELGEATIALLEHNFSFLSLDFTRNLEVALDRIANSEDTYMNVVQQFYQLLQTELQTLRALPSAQDEPRASSTASISSAPTSDFLCGKCGLPLVHRKKAGKGGFDFWGCSGYRTTGCKVSYPTKSGRPDFDNPRGL

SEQ ID NO: 194 - protein, 77 aa, Pseudomonas aeruginosa
MDQSLCTCMPTPIVNPKELRLCHMLVGRTFPITLIAGDHWLSYDGSAWWVDADEPATEDEVAALLVKAGGVTTCWCG

SEQ ID NO: 195 - protein, 81 aa, Pseudomonas aeruginosa
VARASESEISTSTRCSVSKRATDTDKLDRRHFNDPHRTVRAIGAEAARKGLRVFDCPYSHPAMRASWLKGFAQEQQQQLDF

SEQ ID NO: 196 - protein, 156 aa, Pseudomonas aeruginosa
MATPVFWEANIGSAPEHRSFPNGNNPPRQLLRLNVMFDNSIPDGQGGYKDRGGFWCSVEWWHQDAQRFAELFTKGMRVKVEGRAIMDRWPDKESGEEVQALKVEASRISILPHRLAEVTLLPTQHQQSRNVPQQPAQQDAQSQQDYDSAFDDDIPM

SEQ ID NO: 197 - protein, 177 aa, Pseudomonas aeruginosa
MRQLDKDQQGALEQSAFRPLQQTAFQALQHSASLKGLLKPFKGNRELAQLAEQCEAMEQGLLELAQGLLAQVRRPPFTLLPTRLIEQRTSARTTFLRWQHIASRRMGVGVWTEMLRQDKTPEYLLQDLYEMELQRITLNMQISLIHSIGKQAAECAEKMGQAEAEFMGRLQQSTNHH

SEQ ID NO: 198 - protein, 242 aa, Pseudomonas aeruginosa
MAETHRLQIGSLRSDVALTLHTYHAARIWTGRQKSDAKHSILGLSGFCAYVNRMHRGAAQDDPYSDWWLVQIEEKVESCQAALEAIDQRLDDVMAKLPATLDISENLSVTPVKVPLFISNPLGFKAVYLLTNYDELARRILLAQHVGLVGRRDMEVWLDEGASVLRSLFGLAQSYQFSGATRDDFAANNARAEAARKMYEKFGEIPQDILEGTRRSNFAPPITRGRSDGDADDDADRVELED

SEQ ID NO: 199 - protein, 79 aa, Pseudomonas aeruginosa
MFLSMAPFFLVVLVLSALFTDAWNDRELRLLLMLIVFGYSVTVLTITVEMYRFEMAEKAMWGALCNKANYMNCQPDYQR

SEQ ID NO: 200 - protein, 91 aa, Pseudomonas aeruginosa
MRKSRSGVVFFGDAARITLPGPDLRAAGELGDSTGITPPGADLRAAGELGDSTGITLPGIHFGIGGKMGVSGRNTSPKRGITTHEELKQCS

SEQ ID NO: 201 - protein, 441 aa, Pseudomonas aeruginosa
MRLSRFPISTLLDSASGHLEAHLYKKRLAAESGEPLAQQYSGIIFSGNPHETVPRRLLLDKRLTPLERNCWQVFRLLINDDGLTAFPTYEQLRPYLGMQPGKIASRETIAKALTVLRLTRWLSLGRRLRNDLNGQVQGNVYILHDEPVSPAEALELDTDYMQLLSQSTGHGNRAIREIGQIIWREFRDDPDVGRRLPTHLEKLEGRLNHQQWAIDSQLEADPAAEFGIRTLSDLPHSTPSSDAELSEISGKQCALPLSSDTEPRQNPPSTPLVRMPNSYSTYTYKQDSVCKKPVQPRAREEAHPNWQDLLHALEAEQRIQAVSALRRVSEDLRLPIIEQWQHRCAGGTVSNPFGYLMTLIQRAVQGKFNASWAPEEPAERTIPATERPIRAPAPSSPIAPTQPQVQPRGDTRTGSEVLSRLKDLIRPRHGSSVPSERGDDS

SEQ ID NO: 202 - protein, 255 aa, Pseudomonas aeruginosa
MSKSTINEAVLTQVLNHLRNGQLRRCAEMGLRPEILAQLQQPAVMSILTNTPVSWVDVRVNIDVMEKILATAERSAQEDLQIERALKLGATTTMIQSFFGLSPEDTATKRLMLEIHPRRGRWRQLDEQIERQIWFRWEHLMQENQVRLEDSMELLDIAMILTEEINAGIEQDSPEFISLAIVWSLIQSWLKDGLYPSGKSSQSQAGLQKSQSTLYLASVSSHLPHSAPSATTQVNAETERQQLLNLVQSEGDTAP

SEQ ID NO: 203 - protein, 579 aa, Pseudomonas aeruginosa
MSMAKINPQDLKDRLLAPGFTAPPKVLEQLSDPISDTPMRLTLHDVLPWHDNPRTTRNPKYDELKESIRHRGLDTPPPVTRRPGEDKYRIRNGGNTRLEILNDLYKETGDERYFSFDCLFKPWDKQRGEIIALTGHLAENDLKGDLKFIERAVGVQKAKFLYEQENGGESISQRELARRLKADGYPVSQSHISKMLDTIEVLAPAIPVMLYSGLGKPQIEKLLSLRKSASSCWARLYAGEGVDFEMLFQDTLAIFDSSPDEFIFERFQDELIDQMKRPLGLRYDQILLEITNGQQEQRRGTLVDLPTPAAPPQLPPIGQENPAASSTGQAQTQSPAADPQTSRTRSNPGNPLPPPAPPPPVQQKQLPDEERAAVLAGHIVSPVSTKIQQTRQRLAGLEGEHLPVFDETALQAIPVQVGGLHPITDLWYIERSIDTPEILRQHIADLAEEIALHVGAPGEIVRIQGGVGYTYREPNEDHEITDSALHLMTLLQAVSGQVQVVLNTHDQQTCRDALGEFQFSAGLAQLLLGQPTTSDKPSCQAGRLNDEALVKLFRIIRLARRLVDLELPPAASEQAATDQ

SEQ ID NO: 204 - protein, 84 aa, Pseudomonas aeruginosa
MTMARETEDKFVVRMPLGLRDQLKQKAADNHRSANSEIVYRLERSNALEEELARANRMVDELFAKNQRLQAELAAANTPQVAEA

SEQ ID NO: 205 - protein, 338 aa, Pseudomonas aeruginosa
MPIKHAIVHLIEKKPDGTPAVLHARDAELGDSQAIENLLADLNESYNAKNKAWGFFQGESGAYPFSGWLGEYLEGDRDFVGFSREAVEHLQKLMEESNLFTGGHVLFAHYQQGMTDYLAIALLHHSEGVAVNESLEVTPSRHLDLGQLHLAARINISEWRNNKQSKQYISFIKGKGGRKVSDYFRDFIGCQEGVDSPSETRTLLKAFSDFVESEDMAEEQAREKTETLVDYATSQARIGEPMTLDALSELMDDQQPRAFYDYIRNKDYGLSPEIPADKRTLNQFRRFTGRAEGLSISFEAHLLGSRIEYDEERDTLQISSLPTQLRDQLKRRKAQIGE

SEQ ID NO: 206 - protein, 77 aa, Pseudomonas aeruginosa
MRSFLRGARESVRRLVAFAQAEGWSVDRSAGGHLKLSKIGCASIFISSTPSDARGELNARALLRRADRQRSLNQESF

SEQ ID NO: 207 - protein, 164 aa, Pseudomonas aeruginosa
MPDVTAYRPLEHFQKVELMLELKLREGPSWICLNCGYHLDGSGAQPCPDCGKSRYWTSGWSVGRGHRFSAAREEWENRLRTRSRSPVASTAPVATDDVCTQLRTEVRMLRSAHDDLACSRQSDRRSLQALVKRLLDAAATDSLPRSLAEMETWLQLNSEETTNA

SEQ ID NO: 208 - protein, 85 aa, Pseudomonas aeruginosa
MKASQTYQCIVKFDGAGFWTNTIQKQRATCTWSDKVAASRLAERLFGEDNAYITRMPVQAGDHEKRIESRWALSCRNPKEVARDA

SEQ ID NO: 209 - protein, 175 aa, Pseudomonas aeruginosa
MNTEARFPSIHASAAFTDSAVVHANHVGVNPIELDALSQVISRLSRDESTVAPSSMERELRELEELGYIEISTTQAGTLVVTTRAPGQLLSAYFWSVWIPRHLFSCSLKVSLVPHLCCGTQDSQHLTAVFRIAGSKDAAREFLHQLANNYPGHEPELPELVAVQVGDALSKEAES

SEQ ID NO: 210 - protein, 235 aa, Pseudomonas aeruginosa
MTRSALSTIAYEALVRARRKFSNREERCIRETWTAEQELVLLRLYPDMPNEVLAARLNKTLQQICSRAYRLGLKKSPEFSKKIRQDWGSATRFKKGNTPWNCGMKGLPARGRAPETQFKKGQKPHTWLPVGSTRVSADGYLQRKISDTGYPPRDWKGIHILLWEEHFGPIPTGHCVCFKDNNKQNVVIDNLELITRAERMRRNSIHRYPPELKSAIRVISKLKRTIQEVEHEEQD

SEQ ID NO: 211 - protein, 233 aa, Pseudomonas aeruginosa
MDKQKVLAKVEKLMALANAKGATPNEAETALRQAAILKRQFDLSDAEISAHTVETACVPTRTRRSPAPWLHELAGICASSFGCDYLAAYAMPAGWTFKFMGRGIGPELAAHAYSTLHHQLVAARSAHVAQQKRCKLSTKRRRSKLFVEGWLLAVRSLVREFAGRPDESTQAAIKAYLELHHPALKYLEPAALTKALAYDQASLQAGWEHGKNTRLHRGVSRRVQGALEQGGSQ

SEQ ID NO: 212 - protein, 228 aa, Pseudomonas aeruginosa
MSDPKLKPCPLCGSTNIRMLEPELLDTDAWNCAIECLDCQVHIGPSYCEPDPVTARYSAQIDWNRRPSAKNHADEREQFLMANLLAALEVALGDVAALAIVDRVRQATDRIYPTSNLSPVPQAWLDVQAERRRQITVEGFDTSNDDASAGLIALAAGCYALHAGGIGTDWPGGIRNGSALFWPWDEEWWKPKSARENLVRAGALVLAEIERLDRSATEQGSTICKGGA

SEQ ID NO: 213 - protein, 165 aa, Pseudomonas aeruginosa
MNLQNRNNLLLSLIAETQFDAYVQGYMAKAGAAAGASENLQIEAEGAAMLQGLVAPVRAQQRACGQSLQNALLQIAHDLLLQTKSQLAIAANASSIQVIQRDMNRAIWNIATAIDHLAEFAQPSQDTVRVIERLMLFVGSSSSTEGQQLAAEANAVLGMSVGGLA

SEQ ID NO: 214 - protein, 226 aa, Pseudomonas aeruginosa
LNKFGSAADLRSQQAKLTGATREIRKLTGGGIDLFGKLGCYLSFEQKQLLQDAARLLDSVNKQIEHAKEKRDRYEKKAKKRRELRERLAKQLVASNYPLPGNTLEDRLEILQIALIYNRARVFDHLYSTHQLHSKLKRWLERPKQLIGWRSEAEYFASQVGSLRCDFISHLTNEIAYDDGSEVEERLRVIKQKVADCTAQIALTSEEQETLRLWTDALQSAPEGLI

SEQ ID NO: 215 - protein, 309 aa, Pseudomonas aeruginosa
MNAKATSVVSTKGGVGKSTTAANLGAFCADAGIRTLLIDLDPVQPSLSSYYELPEVAQGGIYDLLAANITDPARIISRTIIPNLDVVISNDQNNQLNNLLLQAPDGRLRLANLMPALKEGYDLVLIDTQGARSALLEMVVLASDLVVSPLQPNMLTAREFNRGTMQMLDGLRPYERLGMRIPNVQIVINCLDQTNDSRAIHENVRAIFDEHQDISVLETTVPDAVVFRNAASRGLPAHRLETRQPSNRTSAPALEIIRNLAIEVFPEWTDRFLALTPGGGCSTGQGRALTWRRLLSPKPATSTRNLCWN

SEQ ID NO: 216 - protein, 426 aa, Pseudomonas aeruginosa
MTPQQLTEEYIFAHDLREASAKIYRAATKALLKHFGPTATVQEVDHRSVLGWRRKVLEQGLSKRSWNTYSNHLRTIWGYAIEHELVTHSQVNPFRKTTVIPPRRASKTVAAEAILRARNWLNMQVGAERCTGDRARITPAWFWLCTFEVFYFTGIRLNALLCIRKRDIDWENQLILIRGETEKTHKEFVVPITEGLVPHLSRLLQEADRAGFADDDQLFNVNRFSPHYKSKVMNSDQVEAMYRKLTEKVGVRMTPHRFRHTLATDLMKAPERNIHLTKCLLNHSNIQTTMSYIEADYDHMRAVLHARSLAQGALENVRKVDYSGSPQASAKPKPCGQPLARMGEAPPQEARTEPAEPREHTPGTGIQGDATAWEEALPQPPDTFEQSVLFTLMAQHLSNRAATASAASTATSGSGGWGSTARSSLA

SEQ ID NO: 217 - protein, 125 aa, Pseudomonas aeruginosa
MKSGIATRRLFINDTKALVHTVDGTAMLVTPGIFKRYVQEHPEVEKLAQAKETAGWKLVQRAFEKQGLHRKTSKNLNIWTIKVSGPRKTKELKAYLLQDPKLLFPVQPLDNPSLTVITDAEGGVE

SEQ ID NO: 218 - protein, 280 aa, Pseudomonas aeruginosa
IDQLSEQESVEVVCSAFDVARSCYYVHRLRRRRVDARRVALRSQVNQLFSQSRGSAGSRSILGMLREEGVTIGRFRVRRLMRELGLVSKQPGSHAYKQATVERPDIPNRLNREFATEHPIQVWCGDITYVWAQGRWHYLAAVLDLLIGWAFSAKPDAELVIKALDMAYEQRGRPQQVLFHSDQGSQYASRLFRQRLWRYRMQQSMSRRGNCWDNSPMERLFRSLKSEWVPSTGYLTAQEAQRDISHYLMHRYNWIRPHQFNDGLPPAVAEEKLNPLSGMG

SEQ ID NO: 219 - protein, 102 aa, Pseudomonas aeruginosa
MSKQRRTFSAEFKREAAALVLDQGYSHIDACRSLGVVDSALRRWVKQLEAERQGVTPKSKALTPEQQKIQELEARINRLEREKAILKKATALLMSDELDRTR

SEQ ID NO: 220 - protein, 94 aa, Pseudomonas aeruginosa
MLYFSCSMKMGGWVGYRYFSLFSLIALIYGCVGGGGGSDEIGQHCFEREQKLSGVNDNEEGSVRLNRLNCDPIEGRVLESEKLIRKPPNELGIH

SEQ ID NO: 221 - protein, 207 aa, Pseudomonas aeruginosa
MKKSLVMSAVLLVASNFACADEGSNDGSEICRAQGGVEITSLGEVSKGVDVEDVVVCSILPSNMKSSQRAPTLPPLQRMIISAMPSPGTVTVSASGDRKFTTSCRANLYAPRYANFYPDGVSRGTSDLRCVGYNTPGNSSQGCNVSWDGPTDIQLGVEPYGGSVVVNYSCTAFKTTIPVIMSYSYRDGRAVYGEVQNVSGIINVVLN

SEQ ID NO: 222 - protein, 105 aa, Pseudomonas aeruginosa
MLIKILRIIFLLPIVGLAQQAAASPPAESHSEQSESSCIDVQVNGARSLSYNCMAQQMTPPKEDPRRRNPTLNSTLASERATRLPPTQTGLFTSLHQRAISNSKD

SEQ ID NO: 223 - protein, 67 aa, Pseudomonas aeruginosa
VSSTKSKPIARGRGGPFGEVMKRCGLVPVRGRNRQQTGSLAMGQQETISPSVSRTAACSVRGDSLMP

SEQ ID NO: 224 - protein, 72 aa, Pseudomonas aeruginosa
MERLLESIYINARPAMELRLSLTSSGRKRMVKIVDGEEVEVLPGEVQGILEAQKRDVGILADFLAKSLVARR

SEQ ID NO: 225 - protein, 149 aa, Pseudomonas aeruginosa
MECHVRPATSRDAAAISCVVIAALRESNSQDYPPDVIAQVEQSFSPEAITTQLTKRRVFVALLGENIIGTAGLDGDVVRSVFVDPAHQKGGIGRHLMDVIHTTAASAGVGAVRVPSSITAERFYTALGYQKIRDEFHGAERTIVMEKRL

SEQ ID NO: 226 - protein, 366 aa, Pseudomonas aeruginosa
LWLTCTPQQDVQAALATASILLGQFHQLGVQLGRYTSLDPLEEVEKNASALPSPAWKTDSTKFSVVLKSGGRSIDKGIPTAGLLAHVMVAKFADHLPLYRQEKIFGRAGLAIARSTLAQWVGQTGVRLQPLVDALREAVLNQGVIHADETPVQMLAPGEKKTHRAYVWAYSTTPFSGLKAVVYDFSPSRAGEHARNFLGDWNGKLVCDDFAGYKAGFEQGITEIGCMAHARRKFFDLHVANKSQLAEQALHSISGLYEVERQARDMSDEERWRIRQELAVPILKKLHDWMLAQRDLVPNGSATAKALDYSLKRWVALTRYLDDGAVPIDNNQVENQIRPWALGRSNWLFAGSLRSGKRAAAIMSLI

SEQ ID NO: 227 - protein, 189 aa, Pseudomonas aeruginosa
MVRRRRVAVARECLSLSSAPNQVLSMDFVFDALSTGRRIKCLTVVDDFTKVSVDILVEYGISGFRVTRALDEMARFRGYPQAIRTDQGPEFTGKALDQWACQRDIKLKLIQPGQPTQSAFIESFNGKFRGECLNEHCSLVEARIRIAAWRDYNEHRPHSAIGNLSPAELAAKWRTNQQQLKREKLISTP

SEQ ID NO: 228 - protein, 687 aa, Pseudomonas aeruginosa
MHIQSLGATASSLNQEPVETPSQAAHKSASLRQEPSGQGLGVALKSTPGILSGKLPESVSDVRFSSPQGQGESRTLTDSAGPRQITLRQFENGVTELQLSRPPLTSLVLSGGGAKGAAYPGAMLALEEKGMLDGIRSMSGSSAGGITAALLASGMSPAAFKTLSDKMDLISLLDSSNKKLKLFQHISSEIGASLKKGLGNKIGGFSELLLNVLPRIDSRAEPLERLLRDETRKAVLGQIATHPEVARQPTVAAIASRLQSGSGVTFGDLDRLSAYIPQIKTLNITGTAMFEGRPQLVVFNASHTPDLEVAQAAHISGSFPGVFQKVSLSDQPYQAGVEWTEFQDGGVMINVPVPEMIDKNFDSGPLRRNDNLILEFEGEAGEVAPDRGTRGGALKGWVVGVPALQAREMLQLEGLEELREQTVVVPLKSERGDFSGMLGGTLNFTMPDEIKAHLQERLQERVGEHLEKRLQASERHTFASLDEALLALDDSMLTSVAQQNPEITDGAVAFRQKARDAFTELTVAIVSANGLAGRLKLDEAMRSALQRLDALADTPERLAWLAAELNHADNVDHQQLLDAMRGQTVQSPVLAAALAEAQRRKVAVIAENIRKEVIFPSLYRPGQPDSNVALLRRAEEQLRHATSPAEINQALNDIVDNYSARGFLRFGKPLSSTTVEMAKAWRNKEFT

SEQ ID NO: 229 - protein, 137 aa, Pseudomonas aeruginosa
MIDTWLAQWGLRLPSSNDATLRLQPAEGPELVMERLEGGWLFVVELGLVPSGLPLGVILQLLQVNSPFSSLAPVKLAADDAGRLVLWAEARDGVDDVDALNRLHDRLREGHSRLVPLLEPTGELVPAQIQTSALVFV

SEQ ID NO: 230 - protein, 76 aa, Pseudomonas aeruginosa
DQTCDNLSQNPPHHLLLRLLDHWGDPAGCWSLGQTYSGHLYLPYCRELHKCSLCAHRNWHHYCCLWPVWMLCYMSW

SEQ ID NO: 231 - protein, 76 aa, Pseudomonas aeruginosa; identical to SEQ ID NO: 230

SEQ ID NO: 232 - protein, 76 aa, Pseudomonas aeruginosa; identical to SEQ ID NO: 230

SEQ ID NO: 233 - protein, 58 aa, Pseudomonas aeruginosa
QVQHPPLCLLDQHQQECIPPCLPPDHLQDPQHPFLLPDHHVPHLVVLIQPQLCRALAP

SEQ ID NO: 234 - protein, 56 aa, Pseudomonas aeruginosa
QVQHPCLLDQHQQECIPPCLPPDHLQDPQHPFLLPDHHVPHLVVLIQPQLCRALAP

SEQ ID NO: 235 - protein, 58 aa, Pseudomonas aeruginosa
  VARIANT 6,7: Xaa = Any amino acid
QVQHPXXCLLDQHQQECIPPCLPPDHLQDPQHPFLLPDHHVPHLVVLIQPQLCRALAP

SEQ ID NO: 236 - protein, 161 aa, Pseudomonas aeruginosa
CGGASCHNTLGSYKCMCPAGFQYEQFSGGCQDINECGSAQAPCSYGCSNTEGGYLCGCPPGYFRIGQGHCVSGMGMGRGNPEPPVSGEMDDNSLSPEACYECKINGYPKRGRKRRSTNETDASNIEDQSETEANVSLASWDVEKTAIFAFNISHVNKVRIL

SEQ ID NO: 237 - protein, 161 aa, Pseudomonas aeruginosa; identical to SEQ ID NO: 236

SEQ ID NO: 238 - protein, 162 aa, Pseudomonas aeruginosa
CGGASCHNTLGSYKCMCPAGFQYEQFSGGCQDINECGSAQAPCSYGCSNTEGGYLCGCPPGYFRIGQGHCVSGMGMGRGNPEPPVSGEMDDNSLSPEACYECKINGYPKRGRKRRSTNETDASNIEDQSETEANVSLASWDVEKTAIFAFNISHVSNKVRIL

SEQ ID NO: 239 - protein, 88 aa, Pseudomonas aeruginosa
DGDVYNPSTGVFTAPYDGRYLITATLTPERDAYVEAVLSVSNASVAQLHTAGYRREFLEYHRPPGALHTCGGPGAFHLIVHLKAGDAV

SEQ ID NO: 240 - protein, 46 aa, Pseudomonas aeruginosa
DGYPTGVFTAPGRYLALTRVEAVLSSNVAGYELEPGGPFLILAGDV

SEQ ID NO: 241 - protein, 88 aa, Pseudomonas aeruginosa
DGGYYDPETGVFTAPLAGRYLLSAVLTGHRHEKVEAVLSRSNQGVARVDSGGYEPEGLENKPVAESQPSPGTLGVFSLILPLQAGDTV

SEQ ID NO: 242 - protein, 88 aa, Pseudomonas aeruginosa; identical to SEQ ID NO: 239

SEQ ID NO: 243 - protein, 45 aa, Pseudomonas aeruginosa
DGYPTGVFTAPGRYLALTRVEAVLSSNVAGYELEPGGFLILAGDV

SEQ ID NO: 244 - protein, 88 aa, Pseudomonas aeruginosa; identical to SEQ ID NO: 241

SEQ ID NO: 245 - protein, 51 aa, Pseudomonas aeruginosa
GENGSSGSQAPLQGLRGIFGLWGRRSRARFCGPRPVARLGGGTSAGRELGL

SEQ ID NO: 246 - protein, 24 aa, Pseudomonas aeruginosa
GEGSGPQGRGIGGGPRPGGGSGGL

SEQ ID NO: 247 - protein, 51 aa, Pseudomonas aeruginosa
GEPGPSGENGPQGVRGIPGVVGENGKTGRGGPRGPPGLRGGGGSRGERGGL

SEQ ID NO: 248 - protein, 51 aa, Pseudomonas aeruginosa; identical to SEQ ID NO: 245

SEQ ID NO: 249 - protein, 24 aa, Pseudomonas aeruginosa
GEGSGPQGRGIGGGPRPGGGSGGL

SEQ ID NO: 250 - protein, 51 aa, Pseudomonas aeruginosa; identical to SEQ ID NO: 247

SEQ ID NO: 251 - protein, 138 aa, Pseudomonas aeruginosa
VEPFHQGHHSVDTAAMAGLAFTCLKRSNFNPGRRQRITMAIRTVREEILKAQTPEGHFGNVYSTPLALQFLMTSPMPGAELGTACLKARVALLASLQDGAFQNALMISQLLPVLNHKTYIDLIFPDCLAPRVMLEPAA

SEQ ID NO: 252 - protein, 138 aa, Pseudomonas aeruginosa; identical to SEQ ID NO: 251

SEQ ID NO: 253 - protein, 138 aa, Pseudomonas aeruginosa; identical to SEQ ID NO: 251

SEQ ID NO: 254 - protein, 40 aa, Pseudomonas aeruginosa
VEPFHQGHHSVDTAAMAGLAFTCLKRSNFNPGRRQRITMA

SEQ ID NO: 255 - protein, 40 aa, Pseudomonas aeruginosa; identical to SEQ ID NO: 254

SEQ ID NO: 256 - protein, 40 aa, Pseudomonas aeruginosa; identical to SEQ ID NO: 254

SEQ ID NO: 257 - protein, 40 aa, Pseudomonas aeruginosa; identical to SEQ ID NO: 254

SEQ ID NO: 258 - protein, 40 aa, Pseudomonas aeruginosa; identical to SEQ ID NO: 254

SEQ ID NO: 259 - protein, 40 aa, Pseudomonas aeruginosa; identical to SEQ ID NO: 254

SEQ ID NO: 260 - protein, 141 aa, Pseudomonas aeruginosa
RNCQDIDECVTGIHNCSINETCFNIQGGFRCLAFECPENYRRSAATLQQEKTDTVRCIKSCRPNDVTCVFDPVHTISHTVISLPTFREFTRPEEIIFLRAITPPHPASQANIIFDITEGNLRDSFDIIKRYMDGMTVGIRR

SEQ ID NO: 261 - protein, 138 aa, Pseudomonas aeruginosa
RNCQDIDECVTGIHNCSINETCFNIQGFRCLAFECPENYRRSAATLQQEKTDTVRCIKSCRPNDVTCVFDPVHTISHTVISLPTFREFTRPEEIIFLRAITPPHPASQANIIFDITEGNLRDSFDIIKRYMDGMTVGR

SEQ ID NO: 262 - protein, 141 aa, Pseudomonas aeruginosa
RNCQDIDECVTGIHNCSINETCFNIQGAFRCLAFECPENYRRSAATLQQEKTDTVRCIKSCRPNDVTCVFDPVHTISHTVISLPTFREFTRPEEIIFLRAITPPHPASQANIIFDITEGNLRDSFDIIKRYMDGMTVGVVR

SEQ ID NO: 263 - protein, 150 aa, Pseudomonas aeruginosa
  VARIANT 14, 18, 19, 35, 37, 42, 51, 55, 60, 68, 70, 74, 85, 87, 91,96, 98, 106, 128, 135: Xaa = Any amino acid
PGSRIRGRVDTLQXNAPXXMMVKDEYVHDFEGQPXLXTEGHXIQTIQHPPXNRAXTETYXTPALLAPXEXNATXTANFPNIPVAXTXQPAXILGGXHXEGLLQIAXGPQPGQQQNGFTGQPATYHHNXTTTWTGXRTAPYTPNLPHHQKG

SEQ ID NO: 264 - protein, 122 aa, Pseudomonas aeruginosa
PGGTLQNAPMMVKDEYVHDFEGQPLTEGHIQTIQHPPNRATETYTPALLAPENATTANFPNIPVATQPAILGGHEGLLQIAGPQPGQQQNGFTGQPATYHHNTTTWTGRTAPYTPNLPHHQG

SEQ ID NO: 265 - protein, 148 aa, Pseudomonas aeruginosa
  VARIANT 16, 17: Xaa = Any Amino Acid
PGIDLSGLTLQSSAPXXMMVKDEYVHDFEGQPSLSTEGHSIQTIQHPPSNRASTETYSTPALLAPSESNATSTANFPNIPVASTSQPASILGGSHSEGLLQIASGPQPGQQQNGFTGQPATYHHNSTTTWTGSRTAPYTPNLPHHQNG

SEQ ID NO: 266 - protein, 77 aa, Pseudomonas aeruginosa
MPALRPALLWALLALWLCCATPAHALQCRDGYEPCVNEGMCVTYHNGTGYCKCPGFLGEYCQHRPCEKNRCGDPSTC

SEQ ID NO: 267 - protein, 62 aa, Pseudomonas aeruginosa
MPLRPALALLLWLCAPAHALQCRGEPCVNEGCVTYHNGTGCCPGFLGEYCQHRPCEKNRCTC

SEQ ID NO: 268 - protein, 79 aa, Pseudomonas aeruginosa
MPDLRPAALRALLWLWLCGAGPAHALQCRGGQEPCVNEGTCVTYHNGTGFCRCPEGFLGEYCQHRDPCEKNRCQNGGTC

SEQ ID NO: 269 - protein, 163 aa, Pseudomonas aeruginosa
IRGRVDDQTCDNLSQNPPHHLLLRLLDHWGDPAGCWSLGQTYSGHLYLPYCRELHKCSLCAHRNWHHYCCLWPVWMLCYMSWPMDAETVCHVSVPGVPGARSWHFRVCVSSDQGHLPEDLHGRYADLQWQEEPGSGPCAAQPELLWCAELHQLEHQPLLPGAW

SEQ ID NO: 270 - protein, 170 aa, Pseudomonas aeruginosa
IRGRVDQVQHPPLCLLDQHQQECIPPCLPPDHLQDPQHPFLLPDHHVPHLVVLIQPQLCRALAPQGHILHQICPFQSYPHMVHPQIQLQLVLVHGDPCLLDLGRQEWEGSILPLICHIHLQAHIPLLLPKPLGQHHLFHGAPFHQEPGDHQHHILPLQDRIPHQDSILLP

SEQ ID NO: 271 - protein, 170 aa, Pseudomonas aeruginosa
IRGRVDCGGASCHNTLGSYKCMCPAGFQYEQFSGGCQDINECGSAQAPCSYGCSNTEGGYLCGCPPGYFRIGQGHCVSGMGMGRGNPEPPVSGEMDDNSLSPEACYECKINGYPKRGRKRRSTNETDASNIEDQSETEANVSLASWDVEKTAIFAFNISHVSNKVRILLL

SEQ ID NO: 272 - protein, 130 aa, Pseudomonas aeruginosa
IRGRVDGDVYNPSTGVFTAPYDGRYLITATLTPERDAYVEAVLSVSNASSGPAAYRWVQERVPGIPPPSRSFAYLRGPGGIPPHRAPEGGRCSQRRGDWGQAGSHRLNVLHIWGFLISFPFPPLRWLGRC

SEQ ID NO: 273 - protein, 143 aa, Pseudomonas aeruginosa
IRGRVDKEKKKVFTLGCGTISGLPEGFPLELPEFPPGHFVSRSQRQAGYAPGRAVGATLADCSPLLHLLPAIHPQEVFPQHWLVRSSLCPGENGSSGSQAPLQGLRGIFGLWGRRSRARFCGPRPVARLGGGTSAGRELGLTP

SEQ ID NO: 274 - protein, 131 aa, Pseudomonas aeruginosa
IRGRVDGDBVYNPSTGVFTAPYDGRYLITATLTPERDAYVEAVLSVSNASSGPAAYRWVWERVPGIPPPSRSFAYLRGPGGIPPHRAPEGGRCSQRRGDWGQAGSHRLNVLHIWGFLISFPFPPLRWLGRC

SEQ ID NO: 275 - protein, 168 aa, Pseudomonas aeruginosa
IRGRVDRNCQDIDECVTGIHNCSINETCFNIQGGFRCLAFECPENYRRSAATLQQEKTDTVRCIKSCRPNDVTCVFDPVHTISHTVISLPTFREFTRPEEIIFLRAITPPHPASQANIIFDITEGNLRDSFDIIKRYMDGMTVGVVRQVRPIVGPFHAVLKLEMNYVV

SEQ ID NO: 276 - protein, 145 aa, Pseudomonas aeruginosa
IRGRVDTLQSNAPSSMMVKDEYVHDFEGQPSLSTEGHSIQTIQHPPSNRASTETYSTPALLAPSESNATSTANFPNIPVASTSQPASILGGSHSEGLLQIASGPQPGQQQNGFTGQPATYHHNSTTTWTGSRTAPYTPNLPHHQK

SEQ ID NO: 277 - protein, 139 aa, Pseudomonas aeruginosa
IRGRVDRRPRSGGLRARGVEAFAPGLRSVAPGPEPLKQEEGRREWGSSIGTPSPCGSAQAAAAEEATEKMPALRPALLWALLALWLCCATPAHAQCRDGYEPCVNEGMCVTYHNGTGYCKCPGFLGEYCQHRPCEKNRC

SEQ ID NO: 278 - protein, 953 aa, Pseudomonas aeruginosa
MINSHLLYRLSYRGTSFFQPWTLPVLLDSRLRGAPFYGCARACQPSDPKSFSSFSTSDKTALPLHAAALSRLPDAHEKAPPKRGFPCPPPKRSGEDDLVAFHLRRDTGTRREFAGQDQLRQRVLDPALDGPLQRACAIDRVEADGNQLVQRLLAQFQAQLALGQALAQATELDLGDAGDLLASQRLEHHHFVDPVDEFRTEVRIDRVHHCGTLRLAVAGQLLDLRRTEVGGHHHHGVAEVHRTPVTVGQASVLEHLEENVEYIRMGLLHLVQQHHRVGLAADRLGQVAAFLEADVARRRADQAGHRVFLHELGHIYPHQRLLGIEEELGQRLAQLGLAHPGRAEEEERAARPVRIGEAGARTAHGVGHGDYRLVLADHSPMQLLLHAQQLLALALEHLRHRDTGPLGNHFGDFLVGHLVAQQLVLGLAVLVDHLQAAFQVRDGLVLDARHALEVALAPRRLHLLLGLLDLLLDLRRALHLGLLGLPDLLEVGVFALELDDILLQLGQALPGGFVVFLLQRLALDLQLDQATVETIQFLRLGVDLHADAAGGLVDQVDGLVRQLPIGDVAVRQLGRGDDRAVGDAHPVVHFIAFLEATEDGDGVFLARFVHQHLLEAALQRGILLDVLAILVEGSSTDAVQLAARQSRLEHVAGVHGTFRLAGADHGVQFVDEQDDPAFLLAQFVEDRLQAFLELAAELGTGDQRPHVQGQQALVLEAVRHFAVDDALGQALDDGGLADAGFADQHRVVLGPPLQDLDGPADLVVATDHRVELAFLGALGHVDGVLVQRLARLLDVRVVHRFAATQVGHGILQRLARHALAEQQLAEPGVLVHRGQQYQLAGDELVALLLGQAVSLVEQACEILGQVHVAGRALDLRQRVEFFVEAAAQGGDIEADLHQQGLDRTALLLEQGGKQVHRLDGRMVMANGQGLGVGERQLQLAGQTVYSHGSSFLL

SEQ ID NO: 279 - protein, 854 aa, Pseudomonas aeruginosa
MRIDRLTSKLQLALSDAQSLAVGHDHPAIEPVHLLSALLEQQGGSIKPLLMQVGFDIAALRSGLNKELDALPKIQSPTGDVNLSQDLARLLNQADRLAQQKGDQFISSELVLLAAMDENTRLGKLLLGQGVSRKALENAVANLRGGEAVNDPNVEESRQALDKYTVDMTKRAEEGKLDPVIGRDDEIRRTIQVLQRRTKNNPVLIGEPGVGKTAIVEGLAQRIINGEVPDGLKDKRLLALDMGALIAGAKFRGEFEERLKAVLNELGKQEGRVILFIDELHTMVGAGKAEGAMDAGNMLKPALARGELHCVGATTLDEYRQYIEKDAALERRFQKVLVDEPSEEDTIAILRGLKERYEVHHGVSITDGAIIAAAKLSHRYITDRQLPDKAIDLIDEAASRIRMEIDSKPEELDRLDRRLIQLKIEREALKKEDDEATRKRLAKLEEDIVKLEREYADLEEIWKSEKAEVQGSAQIQQKIEQAKQEMEAARRKGDLESMARIQYQTIPDLERSLQMVDQHGKTENQLLRNKVTDEEIAEVVSKWTGIPVSKMLEGEREKLLRMEQELHRRVIGQDEAVVAVSNAVRRSRAGLADPNRPSGSFLFLGPTGVGKTELCKALAEFLFDTEEALVRIDMSEFMEKHSVARLIGAPPGYVGFEEGGYLTEAIRRKPYSVVLLDEVEKAHPDVFNILLQVLEDGRLTDSHGRTVDFRNTVVVMTSNLGSAQIQELAGDREAQRAAVMDAVNAHFRPEFINRIDEVVVFEPLAREQIAGIAEIQLGRLRKRLAERELSLELSQEALDKLIAVGFDPVYGARPLKRAIQRWIENPLAQLILAGKFAPGASISAKVEGDEIVFA

SEQ ID NO: 280 - protein, 967 aa, Pseudomonas aeruginosa
LEFGSATWTRTRDPMINSHLLYRLSYRGTSFFQPWTLPVLLDSRLRGAPFYGCARACQPSDPKSFSSFSTSDKTALPLHAAALSRLPDAHEKAPPKRGFPCPPPKRSGEDDLVAFHLRRDTGTRREFAGQDQLRQRVLDPALDGPLQRACAIDRVEADGNQLVQRLLAQFQAQLALGQALAQATELDLGDAGDLLASQRLEHHHFVDPVDEFRTEVRIDRVHHCGTLRLAVAGQLLDLRRTEVGGHHHHGVAEVHRTPVTVGQASVLEHLEENVEYIRMGLLHLVQQHHRVGLAADRLGQVAAFLEADVARRRADQAGHRVFLHELGHIYPHQRLLGIEEELGQRLAQLGLAHPGRAEEEERAARPVRIGEAGARTAHGVGHGDYRLVLADHSPMQLLLHAQQLLALALEHLRHRDTGPLGNHFGDFLVGHLVAQQLVLGLAVLVDHLQAAFQVRDGLVLDARHALEVALAPRRLHLLLGLLDLLLDLRRALHLGLLGLPDLLEVGVFALELDDILLQLGQALPGGFVVFLLQRLALDLQLDQATVETIQFLRLGVDLHADAAGGLVDQVDGLVRQLPIGDVAVRQLGRGDDRAVGDAHPVVHFIAFLEATEDGDGVFLARFVHQHLLEAALQRGILLDVLAILVEGSSTDAVQLAARQSRLEHVAGVHGTFRLAGADHGVQFVDEQDDPAFLLAQFVEDRLQAFLELAAELGTGDQRPHVQGQQALVLEAVRHFAVDDALGQALDDGGLADAGFADQHRVVLGPPLQDLDGPADLVVATDHRVELAFLGALGHVDGVLVQRLARLLDVRVVHRFAATQVGHGILQRLARHALAEQQLAEPGVLVHRGQQYQLAGDELVALLLGQAVSLVEQACEILGQVHVAGRALDLRQRVEFFVEAAAQGGDIEADLHQQGLDRTALLLEQGGKQVHRLDGRMVMANGQGLGVGERQLQLAGQTVYSHGSSFLL

SEQ ID NO: 281 - DNA, 2904 bp, Pseudomonas aeruginosa
ttggaatttggctccgcgacctggactcgaaccagggacccaatgattaacagtcatttgctctaccgactgagctatcgcggaacgtctttcttccaaccctggacgcttccggtgttgctggattcgcgtctcagaggcgcgccattttacggatgcgcgcgggcatgtcaaccctctgatccaaaaagtttttcttctttttccacgagcgacaaaacggcccttccactgcatgcggcagcgctctcgcgcctaccggacgcccatgaaaaagccccgccgaagcggggctttccctgtccgcccccgaagaggtcaggcgaagacgatctcgtcgccttccaccttcgccgagatactggcacccggcgcgaatttgccggccaggatcagttgcgccagcgggttctcgatccagcgctggatggcccgcttcagcgggcgtgcgccatagaccgggtcgaagccgacggcaatcagcttgtccagcgcctcctggctcagttccaggctcagctcgcgctcggccaggcgcttgcgcaggcgaccgagctggatctcggcgatgccggcgatctgctcgcgagccagcggctcgaacaccaccacttcgtcgatccggttgatgaattccggacggaagtgcgcattgaccgcgtccatcactgcggcacgttgcgcctcgcggtcgccggccagctcctggatctgcgccgaaccgaggttggaggtcatcaccaccacggtgttgcggaagtccaccgtacgcccgtgactgtcggtcaggcgtccgtcctcgagcacctggaggagaatgttgaatacatccggatgggccttctccacctcgtccagcagcaccaccgagtagggcttgcggcggatcgcctcggtcaggtagccgccttcctcgaagccgacgtagcccggaggcgcgccgatcaggcgggccaccgagtgtttctccatgaactcggacatatctatccgcaccagcgcctcctcggtatcgaagaggaactcggccagcgccttgcacaactcggtcttgcccaccccggtcgggccgaggaagaggaacgagccgctcggccggttcggatcggcgaggccggcgcgcgaacggcgcacggcgttggacacggcgactaccgcctcgtcctggccgatcactcgccgatgcagctcctgctccatgcgcagcagcttctcgcgctcgccctcgagcatcttcgacaccgggataccggtccacttggaaaccacttcggcgatttcctcgtcggtcaccttgttgcgcagcaactggttctcggtcttgccgtgctggtcgaccatctgcaggctgcgttccaggtccgggatggtctggtactggatgcgcgccatgctctcgaggtcgcccttgcgccgcgccgcctccatctcctgcttggcctgctcgatcttctgctggatctgcgccgagccctgcacctcggccttctcggacttccagatctcctcgaggtcggcgtattcgcgctcgagcttgacgatatcctcctccagcttggccaggcgcttcctggtggcttcgtcgtcttccttcttcagcgcctcgcgctcgatcttcagctggatcaggcgacggtcgagacgatccagttcctccggcttggagtcgatctccatgcggatgcggctggcggcctcgtcgatcaggtcgatggccttgtccggcagttgccgatcggtgatgtagcggtgcgacagcttggccgcggcgatgatcgcgccgtcggtgatgctcaccccgtggtgcacttcatagcgttccttgaggccacggaggatggcgatggtgtcttcctcgctcggttcgtccaccagcaccttctggaagcggcgctccagcgcggcatccttctcgatgtactggcgatactcgtcgagggtagtagcaccgacgcagtgcagctcgccgcgcgccagagccggcttgagcatgttgccggcgtccatggcaccttccgccttgccggcgccgaccatggtgtgcagttcgtcgatgaacaggatgacccggccttcctgcttgcccagttcgttgaggaccgccttcaggcgttcctcgaactcgccgcggaacttggcaccggcgatcagcgcccccatgtccagggccagcaggcgcttgtccttgaggccgtccggcacttcgccgttgatgatgcgctgggccaggccctcgacgatggcggtcttgccgacgccgggttcgccgatcagcaccgggttgttcttggtccgccgctgcaggacctggatggtccggcggatctcgtcgtcgcgaccgatcaccgggtcgagcttgccttcctcggcgcgcttggtcatgtcgacggtgtacttgtccagcgcctggcgcgactcctcgacgttcgggtcgttcaccgcttcgccgccacgcaggttggccacggcattctccagcgccttgcgcgacacgccctggccgagcagcagcttgccgagcctggtgttctcgtccatcgcggccagcaataccagctcgctggagatgaactggtcgcccttctgctgggccaggcggtcagcctggttgagcaggcgtgcgagatcctgggacaggttcacgtcgccggtcgggctctggatcttcggcagcgcgtcgagttctttgttgaggccgctgcgcagggcggcgatatcgaagccgacctgcatcagcaggggcttgatcgaaccgccttgctgctcgagcagggcggaaagcaggtgcaccggctcgatggccggatggtcatggccaacggccagggactgggcgtcggagagcgccagttgcagcttgctggtcaaacggtctattcgcatgggtcgtccttccttctatag

SEQ ID NO: 282 - DNA, 309 bp, Pseudomonas aeruginosa
atgagcaagcaacgacgtacgttttccgccgagttcaaacgagaggccgcggccctggtgttggaccaaggctacagccatatcgacgcctgccgttcgctgggggtggtggattcggccttgcgccgttgggtgaagcagctcgaggcggagcgccagggtgtgaccccgaagagcaaggcgttgacgcctgagcagcaaaagatccaggagctggaagcccggatcaaccgattggagcgggagaaagcgatattaaaaaaggctaccgctctcttgatgtcggacgaactcgatcgtacgcgctga

SEQ ID NO: 283 - DNA, 1862 bp, Pseudomonas aeruginosa
ctcaaagtctttctccaggaagactttgcaggagggagtgaggtaggcagcgtagcggaacaggtttcccttgtagtccacctcgccgtccttgggccaacgctgcacctgctggaagatgtagaggccgaacgcatagacgctctctggcggaatgtcccaccacaaccgggtgcttcctgagcgcaagtcgggcggaatgtggatccagaggtccttacgggcttcccagacgcagtaggccagcacaacgatgaccatgcacaggaagccggtgatgaaccggaaggtgttgatgtgtgcctgctgttgcgcagtgtgttttctgaaactcatggggactccgtgcgtcgactggtccaggcgccggagcgcgtaaccaggcgacggttgccgaagacgggaaagcgcagcgagagggccatctccacctggcggtagaaccaggtatcgggccgcccccgcttcatccgccgcaggacgcggctgccgatacctaggccgagggcgccgaccagcagcgcgcccagtggaatgcaggcagcgttacctgcgaccaaggcagccgggatgccaagaacgaacccggctgctccgctggtgaagaccgtgatccacatttcgtctgcggtcaggccgccgatgactaccggttgccggttcaaacgggtcggcaggaagctgagggttccatcctgaaacagatgttcttcgggcatgggaaggcccttacatgatggcggtggctttggtgacgagataaatgatcaagatcagcaggccgacacctacggctacgcccgctccgagatccgaccacttcttcttcccgtcatggatggcgtgataggtgccgtaggtatgccaagcgacccccagaaagacagccgcgcagatgagcagcgcgaggagcatcgctccgtcatagccgaagttctggatggtttgcatgatgcccgatccctccccacggctaggtgcctcgggtttggggagtgcagccaaggcgataccggggagcgccaaagtgatggcggccaggctctggcagagggcggacagtttctggagggtgagtttcagcatgagtgtctccgtatgggtcagctgaggaggaagaaagaggtgatgccgaggaggaccaagatccgggatcgcggaagcgccaccggtggcgctgtcgaaggttgttggtggcccagccgcgccaggtgctgtacatcgcccaggcggaccacagcagaaggaaggtcatcgctgctccaatgaacagtccctcgccggccgatgggggaaagccagcggcggcctggaacgctgatgtctgggctccgctcatgctcatggcatcggccctccgcgcagggtgtaattccctgataagtcggaagggtcacgcggttgggcgcggctgggcgtcatgtagtcctgcaggccttggcggatgcgctgcaggtcagcggccaggcgcgggtagtcgaagtagaagcgctgtccgggctcatcggcgccctgggcactgcggcgggcggtgtcctcgagggcgttgagctgccggatcatcacctccaggttcgcctgctcggaggcgctcgctgcgaaagctccctgtgcgaccagcgcactgcaggccaagacggccaggcagcttcggcgaagggatggatgtggagtgttcacggcgaatctcgtgcagatcagggtgcgatcagcttgccgatcgccctgattccattccgcaagaaatactcggcgcgggtccggggtatttttttatgaggttgcgcgcttgaaaaacagcaggtagctgacgggcagagcgacgccccaagcccagccttgggcgttttgattaccgatct

SEQ ID NO: 284 - DNA, 1462 bp, Pseudomonas aeruginosa
ctgataagtcggaagggtcacgcggttgggcgcggctgggcgtcatgtagtcctgcaggccttggcggatgcgctgcaggtcagcggccaggcgcgggtagtcgaagtagaagcgctgtccgggctcatcggcgccctgggcactgcggcgggcggtgtcctcgagggcgttgagctgccggatcatcacctccaggttcgcctgctcggaggcgctcgctgcgaaagctccctgtgcgaccagcgcactgcaggccaagacggccaggcagcttcggcgaagggatggatgtggagtgttcacggcgaatctcgtgcagatcagggtgcgatcagcttgccgatcgccctgattccattccgcaagaaatactcggcgcgggtccggggtatttttttatgaggttgcgcgcttgaaaaacagcaggtagctgacgggcagagcgacgccccaagcccagccttgggcgttttgattaccgatctcggttacgccccgcatgagtggctgaacgctcaccagctcccagccttcctggcccagacgcacgacctcggcccagcgcagagggttgagcaaggcgtggtcgtcgggttccaaggtgtcttctttgtgtttgaacatcgcgacgcccttggtgagggttttgtagggaatgacgatgttctcgacatggtattcgaagggctgttttatgctcatggtgtgctcctggatcggttcgagtagaaccgcacggtttcaagagcaggaggagggcctcaaccgaaaatactaggcctagcaccagtgaatttctggtggttggcgggtttagagacacgtatggacgtctgggtgtatatttcatatatatttctaagggagacggctgatgcttagaaacatctctattggagttttgctagccatggctgctatgttgggcagttatggggtggctgccgctacattacgatgcgggtcggcaattgttagtgagggcgacttgattgatgatgtgcttagaaagtgcggcaaccctgatagccgtaaaattgaagggcccgcagtggatggtagtggctatatagtgcggggggctgctactgtcgaaaactgggtatatggaccaaggaatggatggtaccagaagcttaggtttgtcgatggaagactagttcagataaaaggcagtatggactagggtatagccgtggatggtgtgttttcatccacggctataagtctcatccggcagatgatataagggtaaggatatttgcgattggtaggccttgtgcgtcggaaataaacacggttgtactggcgcctgcacgggaaaactatctgttgtaggttgttcggattagacatgccaccgttgtaattggcttggaattgcttgctggaacttgctatgtctagaagttcaagtagagtgctttggttggcggattgtgcggagttcatgctgattga

SEQ ID NO: 285 - DNA, 830 bp, Pseudomonas aeruginosa
tccgccgggatgaacgattgcctggtcaaaccggtggatctgaatgcccttcagaactgcttgattaatattctcaaggtggatcgatgagctggaaatcctatcgggtgctggtggtcgaagatcagccgtttcagcgcgaatacctgctcaacctgtttcgcgagcgcggcgtgcagtacctggtaggtgccggcgacggcgcggaggcgttgcgctgcctgaagcaggacaggttcgacctgatcctcagcgatctgatgatgccgggcatggatggtatccaaatgatcctgcaactgccgtatctcaagcatcgtccgaagctggcgctgatgagctcctcgtcgcagcggatgatgctcagtgccagccgggtcgcccagagtctcggcttgtcggtaatcgacctgttgcccaagccgactctgcccaaggccatcggccaacttctggaacacctggaaagatgcctcaggcagaagctggagccggaaaccgacgagactccgcatgggcgcacggcgttgctggatgccctgcataacgagcaactggtgacctggttccaggctaagaaatccctccacaccgggcgcatagtcggcgccgaggcgttgatacgctggagccacccgcagcatggcctgttgctgcccagctgtttcatgagtgatgtcgacgctaccggtctgcacgaggcgttgctctggcgcgtgctcgaacagaccctgaacgcccaggaatcgtggcgcagggcgggttacgagattccggtttcggtgaatctgccgccgcacctgctcgataaccaggaacttccggatcga

SEQ ID NO: 286 - DNA, 987 bp, Pseudomonas aeruginosa
tcgtatttttgtatggtcggcgtagcacttactttagtgatacatgcttacccatgaactgtattccgttagataaggagctgactttaagtgagttcttgtagccatagaactccccaagaccatccccgtcgggaatttcagtgattccatttgcaatgaccgtatggccgcctaaacctagaagcttgggagcatagggaactgctccatctgaaacataaagggtgggtgagcgatggtctctatcttgcttccaagaaaagtacgagtgtataactcctgctagtacctcgctagccggatcattcctggagaagagtacgacatacggccgccatcgactctcatgctcacatgaaatgcctgtgtggaactgtcgattctctaatttttttatgagataaagtaaggtttcctctgagcttttttcgagaggaggtcggcgtatatcaactttagatatttcgccagaggaggatggctgcatccataagggagggtatgcgcctgaaatgagttgatagatcgctgactttatggagaggaaggggacgcaagggaagttggaggagccaaatacttgattacgagactttgcatgctcatatgcactgatctctaagtgagttgaccatcctttattacgtatttcctcttggatgtcgtttggcaataaactgacaattgactcgatccagcaacgagcctcggtactaagcgaaacgggaaggtttcggtctcgcaagtcaagaaatcgaaatttatttagagtttcttcgacttctaatttttctattgcgtcgaatatatgggttgtttggattgaggtctcttttgtttcgatgaggattagtccgggtagtttcttaaagctcatttgctcaagaaaaaggactaaggctggaagtatagagtgctttgggtttccagtaaaaacgacggggccattctcggtatattcaaggtctaaacaatatagcgctt

SEQ ID NO: 287 - DNA, 987 bp, Pseudomonas aeruginosa; identical to SEQ ID NO: 286

SEQ ID NO: 288 - DNA, 1118 bp, Pseudomonas aeruginosa
ctgcctcagccagggcaacaccctcaccggcgcaggggtcacagatcctcatccttcccgacggggcaagagtgagggcctgcagagcgcgttcgagggtgacctcatcggtagggaagtagccgttgcgtgcaaagttgcgcgccaagcgcgggaacatgagggccatggggcctccttgagtctgagagggatggctcaggcttgcgcctgagcatcggtggtaagaatgctttcgcggattacctcaccgagggtgggctcaagcacgtcgacccgcagggcgagtcgccaggcgcagacgttgccgatcgtcccgggtagggccgtcaacatctggtgctgggtgagaacctccatcaccggctcgcgccagtgctgcaggagggggagcggacaggtttccatcaccagcggccagagcctctggtgtggatcctcatcgcgctgcaggagtgcgaaggcgaggtgattgcctcggtcgggcgccgaggcgcgccgatcgaacagccaaagattgagcaggctgccgaacaacgtgccgcggaactgacgggtggtgcgtttctccaggagatcctggtttgggaagacaggtaagcggcggccgtccacgatgatgtggaaatggtcgatgccattttcttcccggcccagcgtcagcctggccaggaactcttgtgtcacggtgtcgcggccccaggccgaaagaaagaccaggttgcactgctcgtcgcacacgcaggcgtcgacgtacaggtctggacactcttcgatctggtagagcggggtgggactgggcataggaacctcctggaaggaggagccacgccgccctcaaggggcggtgaagcccctcggggtgtagtccaactggtgcaggggagcgtggtggctaccgaacgctcttggtgtgagggtcgaagctgagtccatcggcttggtgcagcggcccttggccgatcaggaagacctggcagaggtactgatcgcgtagcgcgacagccgcttccgcctgctccaaggtcagcgacagctcctcgatgaacaagtcgatgagctcgtcgtcgccggcgacgtcgttgttggacagttggtcctcgaggtaggcgagggtt

SEQ ID NO: 289 - DNA, 2427 bp, Pseudomonas aeruginosa
tcacgctgggtatgtgatgctctctgcaaaattcagctacttgatccgcaacaccattcaagggtgaagatagggatagcaagcgaagagacagttttgtgcgttccatgttaaacgggagatacacgtcgaagacctaagccattaaaacgtgctgaccatccagttggggcccattaggatctagcacagcacccatggtgcactggggctatttctcggatgtacaccgttttggtacaggtccggagagagcaggtctggattgcggctgctgtcgaaggctggcctggccggctcggccttgtgggtcgtgcagctggcgagcagcaggcacagcgtgagagtggtcaactgcctggtcattgaggccccctttgatgataggcacacagtggcaggccattcgccatgcttcagcaggaaatactcggcggaggatcagggcttttttatccagttaggcttgcggctaaaagcgcgcggtttccgtcgacctgctcgggctcgatgaggtcctgggcaacctggcgtttcgcgttgagcagttgccacagttgctcgtcgatcgtggcctcgaccagtgggattttcaccacgaccatgcggagctggccgtttcggtacgcgcggtcttcggcttgttcctgctgaccgggagtccagggcaggccgaggaaaaacacgtagttcgccgcagtgaggttgttgcccgtccctgcggccgccgtagtgcagatgaacactcggcagtcgggatcctgctggaagcgatctatcgccttctgccgcttggtgagcgagtcattgcccaccagcgtgacgcagccgtgtccggcctgctcgcagagttccttcagcgcagccacggtcggcttgaactcgcagaacaggatcaccttgtcctctgcgtcgagctcgctcaacaggtccatcgccacgcgaactttcaccgtttccaggtaacgccgcagcgcgccgagtcgcgcgaagaccggtcggtcctcgaggcgcagcacgtcgtattgctggcgttcctcggtggagagggccaccttcagcaactgccgctgcttgcccttgaggctgggcagcacatctttgcgcctgcgcagcatccagtcacccagctccgcccgcagactctggcggaactccgggttgccggcgaaacggtcgcagaactctttcagcggcagttggccgatggggtggcctgagaggcgcagcagggtgtgcagctctgtctcgcggttgagcaccggcgtgccggtaagcaggtagcggttcggcacttgggcggcaatgtcgaaaccgtgccgcgtgcattgcgccgtcggttccttcatccgctgcgcctcgtcgatgaccatcacggcgaagcgcgaagcgttggcgacgaaggggctcaactgctcgtagttgacgaggatccactgcgcctctggggtgtcctgctggatggccacggtggccgagggatagacctcctggatctcccgctgccaattgatcagcagggtagccagggtgatgaccaggattggtctgcccgccgcgcggatcgaagcggcgatgaccgcctggcgggtcttgcccaatcccatgtcgtcggccaataaggcgctggttctctgcagcagatgagcgatgccgtcaggctggtgggccagtagagagtagccctgaagcgccgcctcgatatcagccgagctgtactcggtgcgctcgatctccggcaccgcggcgaggtagatgtcagaggctgactcgtcctccagggatggcgctgccggttcctgctgtggaccgccgatgctcatgctgggcagctcggtcgacggcgcgaagctgccgtcgctgagcagctcctggacagtatccagaatctcgaattgttcctcggcgaggccaagctccagaatcaggttgcttcggagcagctcgggagtggtgtcgatgcgccaggaactcgatgggcgcaggaataccccgcgcatccgccgagccaccgccacaacaccaggatggaactcgcctgacagtaggacgccgccctcggccaggggcgcgatgcgcagcagcatcccccaggtgaaggcctgtcggtcaagcgaggcctgcgcggattcgaccaaggagctgaactcccgccaggactgggagtgaaggcctccagctagctcggcgagacggttgtacagagtgtccagttcaggcagcagcttgcctttggggacccgccagtagcggtgcaacggatgctcccgggcgctgatgaagaagccggacagctccagcagcgcgcgattgctgcctgcgatgtaggggatcttcaagccgaagtcgtagccgtcgaagatagcccgctgcagaagcgtcgaaggtgtcgcggaggtacgattaaccaggcgtggacggttcatc

SEQ ID NO: 290 - DNA, 1185 bp, Pseudomonas aeruginosa
ggagttgaggtggtgcggcaggtgtgggcaggtcgaccagagtgccgcggcgttgctcctgctgcccgttggtaatctcgagcaggatttggtcataacgcaggcccagggggcgcttcatttggtcgatgagttcgtcctggaaacgctcgaaaatgaattcgtcagggctactgtcgaagattgccagggtgtcctggaacagcatttcgaagtcaaccccttcaccagcgtatagacgtgcccagcaggaggatgccgactttctgagtgacaggagtttctcgatttgcggtttaccgagccctgaatacagcatcacaggaatcgccggcgccaatacctcaatagtgtctaacatcttactgatatgggattgagatacagggtagccgtccgcttttagccgacgtgccaactcgcgctgggaaatgctttcaccgccgttctcttgttcgtaaagaaatttcgccttctgcaccccaaccgcgcgctcgatgaacttgaggtcgcccttcagatcgttctcggccaaatgaccggtcagcgcgatgatttcgccgcgctgcttgtcccagggcttgaacaggcagtcgaagctgaaatagcgctcgtctccggtctctttgtagaggtcgttgagaatttccaggcgagtgtttccgccgttgcgaatgcggtatttgtcctctccagggcgtcgagtcactggtggcggcgtatcgaggcctcgatgtcggatcgattctttcagctcatcgtatttcgggtttcgagtggtccgggggttatcgtgccaggggaggacgtcgtggagtgtcagcctcatgggcgtgtcgctgatcgggtccgacaactgctccagaaccttgggcggtgcggtaaaaccaggggcaagtagccggtctttcagatcttgcgggttgatcttggccatactcatgcctccgccacctgaggcgtgttcgccgccgccagctcagcctgcaggcgctggttcttggcgaagagttcgtcgaccattcggtttgctcgcgcgagttcttcttcgagcgcgttgctgcgctccagtcggtagacgatctcgctgttggccgaacggtggttatccgcggctttttgctttagctgatcgcgcaagcccaagggcatacggacaacgaacttatcttcggtttctcgggc

1. An isolated nucleic acid encoding a protein comprising an amino acid sequence at least 25% identical to any one of the amino acid sequences of SEQ ID NOs: 127-229 and SEQ ID NOs: 278-280 over the entire length of said amino acid sequence of SEQ ID NOs: 127-229 and SEQ ID NOs: 278-280 wherein said protein is a pathogenic virulence factor.

2. The nucleic acid of claim 1, encoding a protein comprising an amino acid sequence at least 50% identical to any one of the amino acid sequences of SEQ ID NOs: 127-229 and SEQ ID NOs: 278-280 over the entire length of said amino acid sequence of SEQ ID NOs: 127-229 and SEQ ID NOs: 278-280.

3. The nucleic acid of claim 1, comprising a polynucleotide sequence at least 80% identical to any one of the polynucleotide sequences of SEQ ID NOs: 1-108, SEQ ID NOs: 119-120, and SEQ ID NOs: 281-282 over the entire length of said polynucleotide sequence of SEQ ID NOs: 1-108, SEQ ID NOs: 119-120, and SEQ ID NOs: 281-282.

4. The nucleic acid of claim 3, comprising a polynucleotide sequence identical to any one of the polynucleotide sequences of SEQ ID NOs: 1-108, SEQ ID NOs: 119-120, and SEQ ID NOs: 281-282.

5. The nucleic acid of claim 1, wherein said protein binds a human protein.

6. The nucleic acid of claim 5, wherein said human protein is a lung protein.

7. The nucleic acid of claim 1, wherein said protein has an Arg-Gly-Asp motif.

8. An isolated nucleic acid comprising a polynucleotide sequence at least 65% identical to the corresponding region of any one of the polynucleotide sequences of SEQ ID NOs: 1-108, SEQ ID NOs: 119-120, and SEQ ID NOs: 281-282 or the complement thereof.

9. An isolated nucleic acid that hybridizes at high stringency to a region of any one of the polynucleotide sequences of SEQ ID NOs: 1-108, SEQ ID NOs: 119-120, and SEQ ID NOs: 281-282 or the complement thereof.

10. The nucleic acid of claim 9, having a sequence complementary to at least 50% of at least 60 nucleotides of any one of the polynucleotide sequences of SEQ ID NOs: 1-108, SEQ ID NOs: 119-120, and SEQ ID NOs: 281-282.

11. The nucleic acid of claim 8, comprising at least 100 contiguous nucleotides of any one of the polynucleotide sequences of SEQ ID NOs: 1-108, SEQ ID NOs: 119-120, and SEQ ID NOs: 281-282.

12. The nucleic acid of claim 8, encoding a protein or protein fragment that binds a human lung protein.

13. The nucleic acid of claim 8, encoding a protein or protein fragment comprising an Arg-Gly-Asp motif.

14. A vector comprising a nucleic acid of claim 1.

15. A substantially pure protein comprising an amino acid sequence at least 25% identical to any one of the amino acid sequences of SEQ ID NOs: 127-229 and SEQ ID NOs: 278-280, wherein said protein is a pathogenic virulence factor.

16. The protein of claim 15, comprising an amino acid sequence at least 50% identical to any one of the amino acid sequences of SEQ ID NOs: 127-229 and SEQ ID NOs: 278-280.

17. The protein of claim 16, comprising an amino acid sequence identical to any one of the amino acid sequences of SEQ ID NOs: 127-229 and SEQ ID NOs: 278-280.

18. The protein of claim 15, comprising at least 100 contiguous amino acids of any one of the amino acid sequences of SEQ ID NOs: 127-229 and SEQ ID NOs: 278-280.

19. The protein of claim 18, wherein said protein is immunogenic.

20. The protein of claim 15, wherein said protein binds a human protein.

21. The protein of claim 20 wherein said human protein is a lung protein.

22. The protein of claim 15, comprising an Arg-Gly-Asp motif.

23. An isolated nucleic acid encoding a protein comprising an amino acid sequence at least 25% identical to any one of the amino acid sequences of SEQ ID NOs: 269-277 wherein said protein binds the polypeptide (SEQ ID NO: 278 or SEQ ID NO: 280) encoded by the nucleic acid sequence of ORF7 (SEQ ID NO: 119 or SEQ ID NO: 281).

24. The nucleic acid of claim 23, wherein said protein is expressed in the lungs of a mammal.

25. A substantially pure protein comprising an amino acid sequence at least 25% identical to any one of the amino acid sequences of SEQ ID NOs: 269-277, wherein said protein binds the polypeptide (SEQ ID NO: 278 or SEQ ID NO: 280) encoded by the nucleic acid sequence of ORF7 (SEQ ID NO: 119 or SEQ ID NO: 281).

26. The protein of claim 25, wherein said protein is expressed in the lungs of a mammal.
